(19) United States
(12) Patent Application Publication
(10) Pub. No.: US 2015/0023992 A1
(43) Pub. Date: Jan. 22, 2015

(54) TIMOTHY GRASS ALLERGENS AND METHODS AND USES FOR IMMUNE RESPONSE MODULATION

(71) Applicant: LA JOLLA INSTITUTE FOR ALLERGY AND IMMUNOLOGY, San Diego, CA (US)

(72) Inventors: Alessandro Sette, La Jolla, CA (US); Veronique Schulten, San Diego, CA (US); Howard Grey, La Jolla, CA (US); Bjoern Peters, San Diego, CA (US); Jason Greenbaum, San Diego, CA (US)

(21) Appl. No.: 14/375,980

(22) PCT Filed: Feb. 7, 2013
(86) PCT No.: PCT/US13/25213

§ 371 Date: Jul. 31, 2014

Related U.S. Application Data
(60) Provisional application No. 61/596,156, filed on Feb. 7, 2012.
(60) Provisional application No. 61/734,886, filed on Dec. 7, 2012.

(51) Int. Cl. C07K 14/415

(52) U.S. Cl. CPC C07K 14/415
USPC 424/185.1; 530/370

(57) ABSTRACT

The invention relates to Timothy Grass proteins and peptides, subsequences, portions, homologues, variants and derivatives thereof, and methods and uses of Timothy Grass proteins and peptides. Methods include, for example, modulating an immune response; protecting a subject against or treating a subject for an allergic response, allergic disorder or allergic disease; and inducing immunological tolerance to the allergen in a subject.

### RELATED APPLICATION INFORMATION

[0001] This application claims priority to application Ser. No. 61/596,156, filed Feb. 7, 2012, and application Ser. No. 61/734,886, filed Dec. 7, 2012, both of which applications are expressly incorporated herein by reference in their entirety.

### GOVERNMENT SUPPORT

[0002] This invention received government support from the National Institutes Health contract NIH-NIAIDHHSN272200700048C. The government has certain rights in the invention.

### SEQUENCE LISTING

[0003] The instant application contains a Sequence Listing which has been submitted in ASCII format via EFS-Web and is hereby incorporated by reference in its entirety. Said ASCII copy, created on Feb. 6, 2013, is named 051501-0420334_SL.txt and is 1,444,840 bytes in size.

### FIELD OF THE INVENTION

[0004] The invention relates to Timothy Grass (TG) proteins and peptides, subsequences, portions, homologues, variants and derivatives thereof, and methods and uses of such proteins and peptides, including methods of modulating an immune response, protecting a subject against or treating a subject for an allergic response, allergic disorder or allergic disease and inducing immunological tolerance to the allergen in a subject.

### INTRODUCTION

[0005] Allergic diseases such as rhinitis and asthma pose a significant burden to both patients and society as a whole (1). Recent studies have estimated that up to 20% of the population in the US and Western Europe suffers from these diseases, (2, 3). Despite this high incidence, existing therapy is mostly symptomatic, and immunotherapy treatments are successful in only a fraction of patients and can be associated with significant safety concerns (4). Consequently, much effort in allergy research has been devoted to the development of safer and more effective immunological treatments.

[0006] T cells play an important role in the pathogenesis of allergic diseases. However, the proteins considered as potential immunogens of allergenic T cell responses have traditionally been limited to those that induce IgE responses. Allergic respiratory diseases are associated with high levels of IgE antibodies to certain allergenic proteins and elevated levels of eosinophils that infiltrate the target tissue (5). Production of Th2 cytokines (IL-4, IL-5 and IL-13; (6)) regulates these events as they are critical for the switch to IgE production by differentiating B cells and promote the influx of eosinophils and other inflammatory cells that contribute to airway pathology.

[0007] Despite the importance of Th2 cells and their associated cytokines in the pathogenesis of allergic respiratory disease, studies of antigens considered as triggers of T cell responses have so far been mostly limited to those known to bind IgE antibodies (7, 8) and induce IgE-mediated immediate hypersensitivity reactions (9). Timothy grass (TG) pollen is an inhaled allergen for which major IgE-reactive allergens have been shown to trigger Th2 responses. As disclosed herein, surprisingly Timothy Grass proteins have been discovered that are recognized by Th2 responses independent of IgE-reactivity, including IgG reactive proteins.

### SUMMARY

[0008] Disclosed herein are novel Timothy Grass (TG) proteins and peptides, as well as methods and uses of such novel Timothy Grass proteins and peptides. Timothy Grass proteins and peptides described include antigens and allergens. Also disclosed herein are Timothy Grass proteins, peptides, subsequences, portions, homologues, variants and derivatives thereof, and methods and uses of such Timothy Grass proteins and peptides.

[0009] In accordance with the invention, there are provided proteins and peptides including, consisting of or consisting essentially of an amino acid sequence of a Timothy Grass protein or a subsequence, portion, homologue, variant or derivative thereof. In certain embodiments a Timothy Grass protein comprises, consists of or consists essentially of an amino acid sequence of a protein or peptide set out in Table 1 (SEQ ID NOS 1-620, respectively, in order of appearance), Table 2 (SEQ ID NOS 621-1442, respectively, in order of appearance) Table 4 (SEQ ID NOS 1443-2264, respectively, in order of appearance) or Table 6, or a subsequence, portion, homologue, variant or derivative thereof. In other embodiments a Timothy Grass protein or peptide does not consist of the sequence set forth in Table 1 as SEQ ID NOs:204, 205, 206, 207, 208, 209, 210, 211, 212, 213, 282, 283, 284, 285, 286, 287, 289, 290, 291, 292, 293, 294, 295, 296, 489, 490 or 491; and/or does not consist of the sequence set forth in Table 4 as SEQ ID NOs:1517, 1542, 1598, 1679, 1761, 1849, 1850, 1851, 1935, 2040, 2116, 2133 or 2134.

[0010] In certain embodiments, a protein or peptide elicits, stimulates, induces, promotes, increases or enhances an anti-allergen immune response. In other certain embodiments, a protein or peptide decreases, reduces, inhibits, suppresses or disrupts an anti-allergen immune response. In particular aspects of the proteins and peptides described herein, an anti-allergen immune response is an anti-Timothy Grass allergen response. In further certain embodiments, a protein or peptide elicits, stimulates, induces, promotes, increases or enhances immunological tolerance (desensitizes) to an allergen, for example, a Timothy Grass allergen such as an amino acid sequence set forth Table 1 (SEQ ID NOS 1-620, respectively, in order of appearance), Table 2 (SEQ ID NOS 621-1442, respectively, in order of appearance), Table 4 (SEQ ID NOS 1443-2264, respectively, in order of appearance) or Table 6, or a subsequence, portion, homologue, variant or derivative thereof. In certain aspects, an anti-allergen response or immunological tolerance comprises a T cell response, for example a Th2 cell response (e.g., memory T cell response). In particular embodiments a protein or peptide is an IgG antigen.

[0011] In different embodiments, a protein or peptide includes, consists of or consists essentially of an amino acid sequence of a protein or peptide with open reading frame identification M.693, M.692, M.125, M.714, M.721, M.705, M.591, M.418, M.689, M.644, M.414, M.624, M.617, M.704, M.331, M.604, M.291, M.151, M.498, M.561, M.399, M.603, M.226, M.636, M.473, M.437, M.634, M.676, M.422, M.431, M.387, M.722, M.610, M.574, M.531, M.305, M.282, M.271, M.159, M.83, M.348, M.285, M.288, M.287, M.212, M.715, M.725, M.694, M.701, M.595, M.718, M.720, M.723, M.648, M.662, M.576, M.618, M.631, M.682, M.421, M.654, M.393, M.669, M.625, M.655, M.524, M.570, M.341, M.342, M.450, M.343, M.639, M.555, M.546, M.606, M.628, M.248, M.466, M.328, M.695, M.658, M.560, M.548, M.269, M.728, M.653, M.759, M.765, M.747, M.763, M.733, M.651, M.677, M.597, M.547, M.761, M.571, M.562, M.657, M.738, M.734, M.621, M.741, M.177, M.579, M.513, M.446, M.388, M.391, M.593, M.506, M.395, M.381, M.372, M.619, M.656, M.525, M.698, M.699, M.439, M.630, M.708, M.620, M.758, M.764, M.746, M.762, M.716, M.726, MN.66, M.717, M.727, M.719, M.724, M.577, M.8, M.235, M.678, M.675, M.641, M.499, M.583, M.649, M.6, M.29, M.34, M.183, M.101, M.149, M.164, M.129, M.45, M.116, M.165, M.146, M.69, M.123, M.107, M.3, M.113, M.204, M.174, M.178, M.191, M.580, M.587, M.594, M.539, M.569, M.588, M.615, M.578, M.352, M.514, M.419, M.443, M.540, M.640, M.642, M.646, M.627, M.626, M.645, M.652, M.650, M.559, M.622, M.565, M.567, M.581, M.609, M.182, M.134, M.283, M.297, M.367, M.84, M.189, M.586, M.496, M.255, M.471, M.575, M.163, M.314, M.194, M.294, M.472, M.369, M.104, M.206, M.24, M.469, M.420, M.444, M.697, M.687, M.713, M.638, M.673, M.700, M.702, M.707, M.710, M.683, M.670, M.643, M.663, M.664, M.666, M.748, M.731, M.735, M.750, M.752, M.756, M.754, M.608, M.740, M.39, M.303, M.389, M.390, M.284, M.201, M.28, M.364, M.344, M.74, M.180, M.317, M.298, M.192, M.77, M.92, M.144, M.9, M.296, M.187, M.172, M.72, M.38, M.239, M.289, M.240, M.214, M.365, M.614, M.598, M.632, M.633, M.616, M.690, M.607, M.672, M.545, M.671, M.272, M.301, M.202, M.492, M.647, M.457, M.686, M.495, M.486, M.729, M.760, M.668, M.599, M.417, M.635, M.584, M.592, M.709, M.489, M.392, M.347, M.458, M.464, M.415, M.520, M.410, M.467, M.494, M.374, M.118, M.346, M.318, M.519, M.600, M.254, M.438, M.479, M.523, M.380, M.480, M.371, M.482, M.261, M.108, M.260, M.556, M.461, M.400, M.474, M.490, M.491, M.401, M.470, M.409, M.435, M.553, M.537, M.402, M.481, M.483, M.554, M.538, M.234, M.237, M.264, M.563, M.566, M.532, M.557, M.573, M.549, M.550, M.551, M.558, M.463, M.684, M.739, M.637, M.517, M.712, M.732, M.711, M.730, M.736, M.737, M.247, M.13, M.57, M.61, M.47, M.43, M.32, M.518, M.267, M.73, M.270, M.150, M.366, M.679, M.680, M.230, M.530, M.667, M.505, M.488, M.445, M.436, M.508, M.688, M.613, M.487, M.552, M.572, M.336, M.534, M.213, M.384, M.220, M.147, M.127, M.145, M.33, M.110, M.173, M.50, M.249, M.18, M.5, M.25, M.394, M.329, M.330, M.345, M.323, M.316, M.130, M.131, M.203, M.227, M.128, M.70, M.292, M.526, M.585, M.681, M.685, M.596, M.660, M.674, M.703, M.504, M.515, M.521, M.493, M.497, M.509. M.533, M.484, M.302, M.478, M.222, M.691, M.510, M.119, M.535, M.543, M.528, M.529, M.373, M.590, M.361, M.432, M.477, M.408, M.568, M.589, M.462, M.516, M.522, M.412, M.4, M.256, M.56, M.55, M.64, M.22, M.148, M.205, M.332, M.171, ME.3566, ME.4276, ME.4056, ME.3805, ME.3720, ME.3916, ME.3855, ME.1412, ME.4234, ME.4088, ME.4115, ME.4210, ME.3897, ME.4229, ME.4231, ME.4280, ME.4281, ME.1571, ME.4190, ME.4230, ME.3882, MN.82, MN.124, MN.169, MN.185, MN.140, MN.201, MN.193, MN.183. MN.184, MN.173, MN.210, MN.206, MN.136, MN.94, MN.83, MN.14, MN.3, MN.46, MN.17, MN.20, MN.12, MN.35, MN.15, MN.38, MN.74, MN.41, MN.67, MN.27, MN.75, MN.47, MN.33, MN.86, MN.59, MN.8, MN.51, MN.62, MN.56, MN.30, MN.81, MN.91, MN.36, MN.71, MN.80, MN.76, MN.96, MN.106, MN.90, MN.57, MN.25, MN.108, MN.186, MN.58, MN.6, MN.77, MN.107, MN.203, MN.204, MN.211, MN.205, MN.68, MN.98, MN.93, MN.113, MN.123, MN.69, MN.178, MN.182, MN.4, MN.166, MN.167, MN.172, MN.168, MN.105, MN.39, MN.194, MN.195, MN.101, MN.116, MN.181, MN.97, MN.54, MN.156. MN.117, MN.163, MN.175, MN.102, MN.202, MN.157, MN.119, MN.114, MN.92, MN.88, MN.153, MN.95, MN.128, MN.122, MN.118, MN.99, MN.72, MN.214, MN.219, MN.220, MN.199, MN.224, MN.218, MN.215, MN.207, MN.223, MN.221, MN.222, MN.216, MN.162, MN.142, MN.158, MN.141, MN.53, MN.111, MN.112, MN.120, MN.130, MN.132, MN.127, MN.121, MN.139, MN.146, MN.64, MN.87, MN.89, MN.37 or MN.164, or subsequence, portion, homologue, variant or derivative thereof.

[0012] As disclosed herein, in certain embodiments proteins and peptides have a length in a range of about 5-10, 10-15, 15-20, 20-25, 25-30, 30-35, 35-40, 45-50, 50-60, 60-70, 70-80, 90-100, 100-125, 125-150, 150-175, 175-200, 200-250, 250-300, or more amino acid residues. In other embodiments, proteins and peptides have a length in a range of up to 25 amino acids in length, or from about 7 to 20; 8 to 30; 8 to 25; 8 to 20; 9 to 30; 9 to 25; 9 to 20; 10 to 30; 10 to 25; 10 to 30 amino acid residues.

[0013] Proteins and peptides include isolated and purified forms. Proteins and peptides also include those immobilized on a substrate, as well as amino acid sequences, subsequences, portions, homologues, variants, and derivatives immobilized on a substrate.

[0014] Proteins and peptides can be included in compositions, for example, a pharmaceutical composition. In particular embodiments, a pharmaceutical composition is suitable for specific or non-specific immunotherapy, or is a vaccine composition.

[0015] Isolated nucleic acid (including isolated nucleic acid) encoding a protein or peptide (TG protein or peptide), or a subsequence, portion, homologue, variant or derivative thereof are provided. In one embodiment, a nucleic acid encodes an amino acid sequence of a protein or peptide set forth in Table 1 (SEQ ID NOS 1-620, respectively, in order of appearance), Table 2 (SEQ ID NOS 621-1442, respectively, in order of appearance), Table 4 (SEQ ID NOS 1443-2264, respectively, in order of appearance) or Table 6, or a subsequence, portion, homologue, variant or derivative thereof.

[0016] Also provided are cells expressing a protein or peptide described herein. In various embodiments, a cell expresses a Timothy Grass protein that includes, consists of or consists essentially of an amino acid sequence of a protein or peptide set out in Table 1 (SEQ ID NOS 1-620, respectively, in order of appearance), Table 2 (SEQ ID NOS 621-1442, respectively, in order of appearance) Table 4 (SEQ ID NOS 1443-2264, respectively, in order of appearance) or Table 6, or a subsequence, portion, homologue, variant or derivative thereof. In certain aspects, a cell is a eukaryotic or prokaryotic cell and may be a mammalian, insect, fungal or bacterium cell.

[0017] Methods and uses and medicaments of proteins and peptides of the invention are included. In various embodiments, there are provided methods and uses of modulating an immune response against an allergen in a subject. In one embodiment, a method or use includes administering (delivering) an allergen to a subject an amount of the protein described herein sufficient to modulate the immune response against the allergen in the subject.

[0018] Such methods, uses and medicaments also include modulating immune activity of a cell against an allergen; and desensitizing, inducing, eliciting, increasing or improving in the cell immunological tolerance to an allergen. In particular embodiments, a method or use includes contacting a cell with an amount of the protein or peptide of any one of the above-mentioned embodiments, sufficient to modulate the immune activity of the cell against the allergen (e.g., against an allergen from which the peptide or protein derives), or administering to a subject an allergen from which the peptide or protein derives in order to desensitize, induce, elicit, increase or improve immunological tolerance to the allergen or to modulate an immune response against an allergen in a subject (e.g., an allergen from which the peptide or protein derives).

[0019] Invention proteins, peptides, subsequences, portions, homologues, variants and derivatives thereof are suitable as a reagent for example, for specific immunotherapy. In particular embodiments, a protein or peptide suitable as a reagent includes, consists of or consists essentially of an amino acid sequence of a protein or peptide set forth in Table 1 (SEQ ID NOS 1-620, respectively, in order of appearance), Table 2 (SEQ ID NOS 621-1442, respectively, in order of appearance), Table 4 (SEQ ID NOS 1443-2264, respectively, in order of appearance) or Table 6, or a subsequence, portion, homologue, variant or derivative thereof.

[0020] Such methods, uses and medicaments further include reducing risk or providing a subject protection against an allergic reaction, allergic response, allergic disorder or allergic disease. In one embodiment, a method or use includes administering to the subject an amount of the protein or peptide sufficient to reduce risk or provide the subject with protection against the allergic reaction, allergic response, allergic disorder or allergic disease. Non-limiting examples of an allergic reaction or allergic response include allergic alveolitis, allergic bronchopulmonary aspergillosis, allergic conjunctivitis, allergic coryza, allergic dermatitis, allergic vasculitis, and allergic rhinitis.

[0021] Such methods, uses and medicaments additionally include treating an allergic reaction, allergic response, allergic disorder or allergic disease. In one embodiment, a method or use includes administering to the subject an amount of the protein or peptide, sufficient to treat the subject for the allergic response, allergic disorder or allergic disease.

[0022] In such methods, uses and medicaments, a peptide or protein can be derived from or based upon the allegen or can be derived from or based upon an allergen originating from the same organism as the allergen. More particularly, for example, a protein or peptide can be derived from or based upon an allergen causing the allergic reaction, allergic response, allergic disorder or allergic disease or said peptide derives from an allergen belonging to the same organism as the allergen causing said allergic reaction, allergic response, allergic disorder or allergic disease. Additionally, for example, a protein or peptide can be based upon or derived from an amino acid sequence set forth in Table 1 (SEQ ID NOS 1-620, respectively, in order of appearance), Table 2 (SEQ ID NOS 621-1442, respectively, in order of appearance), Table 4 (SEQ ID NOS 1443-2264, respectively, in order of appearance) or Table 6, or a subsequence, portion, homologue, variant or derivative thereof.

[0023] In various embodiments, a method or use desensitizes or induces, elicits, increases or improves immunological tolerance of a subject to an allergen in Table 1 (SEQ ID NOS 1-620, respectively, in order of appearance), Table 2 (SEQ ID NOS 621-1442, respectively, in order of appearance), Table 4 (SEQ ID NOS 1443-2264, respectively, in order of appearance) or Table 6. In various other embodiments, a method or use desensitizes or induces, elicits, increases or improves immunological tolerance of a subject to an amino acid sequence set forth in Table 1 (SEQ ID NOS 1-620, respectively, in order of appearance), Table 2 (SEQ ID NOS 621-1442, respectively, in order of appearance), Table 4 (SEQ ID NOS 1443-2264, respectively, in order of appearance) or Table 6, or a subsequence, portion, homologue, variant or derivative thereof.

[0024] As set forth herein a protein, peptide, method, use or medicament can include administration or delivery by any means, systemically, regionally or locally. In particular aspects, a protein or peptide is administered cutaneously, subcutaneously, epicutaneously, intracutaneously, intramuscularly, intravenously, orally, mucosally, by inhalation or nasally. As also set forth herein a protein, peptide, method, use or medicament can include repeatedly contacting a cell with, or administering to a subject, the protein or peptide, multiple times.

[0025] Proteins and peptides can be used in diagnostic and detection methods and uses. In one embodiment, detecting an allergic response, or diagnosing an allergy in a subject, a method or use includes contacting a cell from the subject (which may be an ex vivo or in vivo cell) with a protein or peptide as set forth herein; and determining if the protein or peptide modulates an immune response or activity from the contacted cell. If the protein or peptide modulates an immune response or activity from the contacted cell (which may be an ex vivo or in vivo cell) detects an allergic response or indicates that the subject has an allergic response or an allergy. In particular aspects, modulation of immune response or activity is determined by assaying for a hypersensitive reaction or response, such as a cutaneous immunological hypersensitive reaction.

[0026] Subjects in accordance with invention include mammals, such as humans. In particular embodiments, a subject has exhibited a symptom of, or suffers from, an allergic reaction, allergic response, allergic disorder or allergic disease. In more particular embodiments, a subject has had an allergic reaction or allergic response to a Timothy Grass allergen or another Grass of the order Poales. In additional particular embodiments, a subject has had an allergic reaction or allergic response to an allergen derived from or produced by Timothy Grass, such as an allergen or an amino acid sequence set forth in Table 1 (SEQ ID NOS 1-620, respectively, in order of appearance), Table 2 (SEQ ID NOS 621-1442, respectively, in order of appearance), Table 4 (SEQ ID NOS 1443-2264, respectively, in order of appearance) or Table 6, or a subsequence, portion, homologue, variant or derivative thereof. In further particular embodiments, a subject has had an allergic reaction or allergic response to an allergen derived from or produced by Timothy Grass selected from Phl p 1, Phl p 5, Phl p6 or a homologous allergen or antigen thereto.

### DESCRIPTION OF DRAWINGS

[0027] FIG. 1 shows that known allergens do not account for the total T cell response against whole pollen extract. 35 pools (average 20 peptides/pool) of overlapping peptides spanning the ten major TG allergens along with whole TG extract were screened for recognition by PBMCs from allergic donors using IL-5 ELISPOT assays. The majority of donors who had an IL-5 T cell response to TG extract of ≧100 SFC per million input PBMCs showed a response pattern similar to that shown in panel A, with several pools eliciting strong IL-5 responses. However, some donors showed a response pattern as depicted in panel B, where a vigorous response was detected against extract but no response was detected against peptides from known allergens. In total, as shown in panel C, 33% of donors reacted to none of the peptide pools despite strong extract responses (n=21).

[0028] FIGS. 2A-2B show a 2D gel electrophoresis and immunoblot analysis of TG extract using pooled sera from allergic donors. TG pollen extract was run on a 2D gel and stained with Coomassie brilliant blue (A). A second gel run in parallel was blotted and probed with a serum pool from 8 TG-allergic donors to identify proteins reactive with human IgE and IgG. Anti IgE-red, anti IgG-green, dual reactivity-yellow (B).

[0029] FIGS. 3A-3B show that a majority of TG specific T cells target novel antigens. A) Bar chart indicating the IL-5 response rate of PBMCs from allergic and non-allergic donors to peptide pools from known and novel antigens. Open bars indicate response rates from allergic donors, solid bars indicate responses from normal donors (n=20 per donor group). B) Bar chart showing the total number of IL-5 producing T cells targeting novel antigens (light grey) vs. known allergens (dark grey) in normal and allergic patients.

[0030] FIG. 4 shows percentage recognition of novel Timothy grass antigens (NTGA) by TG allergic donors. Bar chart showing percentage of donors producing IL-5 in response to novel Timothy grass antigens (NTGA)-derived peptide stimulation. NTGAs are categorized according to antibody reactivity as indicated on the X-axis. The dashed line indicates the minimum threshold of ≧20% recognition to be considered an allergen.

[0031] FIG. 5 shows that memory T cells are the source of IL-5 T cell responses after in vitro expansion. IL-5 production in naïve and memory T cells in response to TG extract (TG), the dominant known (TG P20) and novel peptide pools (NTGA P19) were measured after 14 days of expansion following TG stimulation in vitro (n=6).

[0032] FIGS. 6A-6B show T cell responses against conventional and novel TG antigens can be detected directly ex vivo. A) FACS plot showing the Th2 T cell subset sorted based on expression of CXCR3 (Th1) and CCR4 (Th2). B) IL-5 production by Th2 cells from allergic donors in response to TG extract, the dominant known (TG P20) and novel (NTGA P19) peptide pools as measured ex vivo (n=8).

[0033] FIG. 7 shows production of IL-4, IL-5, IL-13 and all Th2 cytokines (IL-4, 5 and 13 combined) in response to TG extract, PHA, TG P20 and NTGA P19. TG stimulated cells were cultured in vitro with IL-2 for 14 days. Cells were re-stimulated with TG extract, the dominant known and novel TG peptide pools (TG P20 and NTGA P19) and PHA. Th2 cytokine production was measured by ELISPOT to determine the best read-out system.

[0034] FIGS. 8A-8B show deconvolution of positive peptide pools to identify T-cell reactive antigens and epitopes. IL-5 production from PBMC of allergic individuals in response to single peptides was measured. A) Number of recognition events (defined as one peptide recognized by at least one patient with a magnitude of ≧20 SFC) per antigen tested. B) Sum of the magnitudes of IL-5 responses against peptides from each positive antigen.

### DETAILED DESCRIPTION

[0035] As disclosed herein, T cell responses against Timothy Grass (TG) allergen do not correlate with IgE levels and T cell responses in TG pollen allergic individuals. Furthermore, as also disclosed herein a third of the patients studied had no Th2 cell response against any of the known IgE reactive proteins despite having strong responses against whole TG extract. The invention relates to in part to the discovery that TG pollen extract contains novel T cell antigens in addition to the known IgE-inducing allergens.

[0036] Thus, in accordance with the invention, there are provided novel Timothy grass proteins and novel Timothy grass peptides, and subsequences, portions, homologues, variants and derivatives thereof. A Timothy grass protein or peptide as described herein may include any Timothy grass protein or peptide, or a subsequence, portion, homologue, variant or derivative thereof. In certain embodiments, a Timothy grass protein or peptide as described herein may include a novel Timothy grass protein or peptide, or a subsequence, portion, homologue, variant or derivative thereof.

[0037] In particular embodiments, a Timothy grass protein or peptide described herein includes, consists or consists essentially of a protein or peptide having an open reading frame amino acid sequence set out in Table 1 (SEQ ID NOS:1-620, respectively, in order of appearance), or a subsequence, portion, homologue, variant or derivative thereof (e.g, of all or a part of an amino acid sequence in Table 1 (SEQ ID NOS:1-620, respectively, in order of appearance). In other embodiments, a Timothy grass protein or peptide, includes, consists or consists essentially of an amino acid sequence of a protein or peptide set forth in Table 1 (SEQ ID NOS 1-620, respectively, in order of appearance), Table 2 (SEQ ID NOS 621-1442, respectively, in order of appearance), Table 4 (SEQ ID NOS 1443-2264, respectively, in order of appearance) or Table 6, or a subsequence, portion, homologue, variant or derivative thereof (e.g, of all or a part of an amino acid sequence in Table 1 (SEQ ID NOS 1-620, respectively, in order of appearance), Table 2 (SEQ ID NOS 621-1442, respectively, in order of appearance), Table 4 (SEQ ID NOS 1443-2264, respectively, in order of appearance) or Table 6. In certain embodiments, a Timothy grass protein, peptide, subsequence, portion, homologue, variant or derivative thereof, includes, consists of or consists essentially of an amino acid sequence of a protein or peptide with open reading frame identification M.693, M.692, M.125, M.714, M.721, M.705, M.591, M.418, M.689, M.644, M.414, M.624, M.617, M.704, M.331, M.604, M.291, M.151, M.498, M.561, M.399, M.603, M.226, M.636, M.473, M.437, M.634, M.676, M.422, M.431, M.387, M.722, M.610, M.574, M.531, M.305, M.282, M.271, M.159, M.83, M.348, M.285, M.288, M.287, M.212, M.715, M.725, M.694, M.701, M.595, M.718, M.720, M.723, M.648, M.662, M.576, M.618, M.631, M.682, M.421, M.654, M.393, M.669, M.625, M.655, M.524, M.570, M.341, M.342, M.450, M.343, M.639, M.555, M.546, M.606, M.628, M.248, M.466, M.328, M.695, M.658, M.560, M.548, M.269, M.728, M.653, M.759, M.765, M.747, M.763, M.733, M.651, M.677, M.597, M.547, M.761, M.571, M.562, M.657, M.738, M.734, M.621, M.741, M.177, M.579, M.513, M.446, M.388, M.391, M.593, M.506, M.395, M.381, M.372, M.619, M.656, M.525, M.698, M.699, M.439, M.630, M.708, M.620, M.758, M.764, M.746, M.762, M.716, M.726, MN.66, M.717, M.727, M.719, M.724, M.577, M.8, M.235, M.678, M.675, M.641, M.499, M.583, M.649, M.6, M.29, M.34, M.183, M.101, M.149, M.164, M.129, M.45, M.116, M.165, M.146, M.69, M.123, M.107, M.3, M.113, M.204, M.174, M.178, M.191, M.580, M.587, M.594, M.539, M.569, M.588, M.615, M.578, M.352, M.514, M.419, M.443, M.540, M.640, M.642, M.646, M.627, M.626, M.645, M.652, M.650, M.559, M.622, M.565, M.567, M.581, M.609, M.182, M.134, M.283, M.297, M.367, M.84, M.189, M.586, M.496, M.255, M.471, M.575, M.163, M.314, M.194, M.294, M.472, M.369, M.104, M.206, M.24, M.469, M.420, M.444, M.697, M.687, M.713, M.638, M.673, M.700, M.702, M.707, M.710, M.683, M.670, M.643, M.663, M.664, M.666, M.748, M.731, M.735, M.750, M.752, M.756, M.754, M.608, M.740, M.39, M.303, M.389, M.390, M.284, M.201, M.28, M.364, M.344, M.74, M.180, M.317, M.298, M.192, M.77, M.92, M.144, M.9, M.296, M.187, M.172, M.72, M.38, M.239, M.289, M.240, M.214, M.365, M.614, M.598, M.632, M.633, M.616, M.690, M.607, M.672, M.545, M.671, M.272, M.301, M.202, M.492, M.647, M.457, M.686, M.495, M.486, M.729, M.760, M.668, M.599, M.417, M.635, M.584, M.592, M.709, M.489, M.392, M.347, M.458, M.464, M.415, M.520, M.410, M.467, M.494, M.374, M.118, M.346, M.318, M.519, M.600, M.254, M.438, M.479, M.523, M.380, M.480, M.371, M.482, M.261, M.108, M.260, M.556, M.461, M.400, M.474, M.490, M.491, M.401, M.470, M.409, M.435, M.553, M.537, M.402, M.481, M.483, M.554, M.538, M.234, M.237, M.264, M.563, M.566, M.532, M.557, M.573, M.549, M.550, M.551, M.558, M.463, M.684, M.739, M.637, M.517, M.712, M.732, M.711, M.730, M.736, M.737, M.247, M.13, M.57, M.61, M.47, M.43, M.32, M.518, M.267, M.73, M.270, M.150, M.366, M.679, M.680, M.230, M.530, M.667, M.505, M.488, M.445, M.436, M.508, M.688, M.613, M.487, M.552, M.572, M.336, M.534, M.213, M.384, M.220, M.147, M.127, M.145, M.33, M.110, M.173, M.50, M.249, M.18, M.5, M.25, M.394, M.329, M.330, M.345, M.323, M.316, M.130, M.131, M.203, M.227, M.128, M.70, M.292, M.526, M.585, M.681, M.685, M.596, M.660, M.674, M.703, M.504, M.515, M.521, M.493, M.497, M.509. M.533, M.484, M.302, M.478, M.222, M.691, M.510, M.119, M.535, M.543, M.528, M.529, M.373, M.590, M.361, M.432, M.477, M.408, M.568, M.589, M.462, M.516, M.522, M.412, M.4, M.256, M.56, M.55, M.64, M.22, M.148, M.205, M.332, M.171, ME.3566, ME.4276, ME.4056, ME.3805, ME.3720, ME.3916, ME.3855, ME.1412, ME.4234, ME.4088, ME.4115, ME.4210, ME.3897, ME.4229, ME.4231, ME.4280, ME.4281, ME.1571, ME.4190, ME.4230, ME.3882, MN.82, MN.124, MN.169, MN.185, MN.140, MN.201, MN.193, MN.183. MN.184, MN.173, MN.210, MN.206, MN.136, MN.94, MN.83, MN.14, MN.3, MN.46, MN.17, MN.20, MN.12, MN.35, MN.15, MN.38, MN.74, MN.41, MN.67, MN.27, MN.75, MN.47, MN.33, MN.86, MN.59, MN.8, MN.51, MN.62, MN.56, MN.30, MN.81, MN.91, MN.36, MN.71, MN.80, MN.76, MN.96, MN.106, MN.90, MN.57, MN.25, MN.108, MN.186, MN.58, MN.6, MN.77, MN.107, MN.203, MN.204, MN.211, MN.205, MN.68, MN.98, MN.93, MN.113, MN.123, MN.69, MN.178, MN.182, MN.4, MN.166, MN.167, MN.172, MN.168, MN.105, MN.39, MN.194, MN.195, MN.101, MN.116, MN.181, MN.97, MN.54, MN.156. MN.117, MN.163, MN.175, MN.102, MN.202, MN.157, MN.119, MN.114, MN.92, MN.88, MN.153, MN.95, MN.128, MN.122, MN.118, MN.99, MN.72, MN.214, MN.219, MN.220, MN.199, MN.224, MN.218, MN.215, MN.207, MN.223, MN.221, MN.222, MN.216, MN.162, MN.142, MN.158, MN.141, MN.53, MN.111, MN.112, MN.120, MN.130, MN.132, MN.127, MN.121, MN.139, MN.146, MN.64, MN.87, MN.89, MN.37 or MN.164, or subsequence, portion, homologue, variant or derivative thereof. The foregoing and other TG proteins and peptides set forth herein may be used in the methods and uses, including methods and uses disclosed herein.

[0038] In particular embodiments, a protein or peptide includes, consists of or consists essentially of a Timothy Grass amino acid sequence set forth in Table 1 (SEQ ID NOS 1-620), or a subsequence, portion, homologue, variant or derivative thereof. Said homologues may have at least 65%, 70, 75, 80, 85, 90 or 95% homology or identity to the corresponding Timothy Grass amino acid sequence set forth in Table 1 (SEQ ID NOS 1-620), Table 2 (SEQ ID NOS 621-1442), Table 4 (SEQ ID NOS 1443-2264) or Table 6. Such subsequences may be 7 to 30 amino acids in length, and optionally further where at least 7 amino acids has at least 75%, or at least 80%, 85%, 90% identity or homology to at least 7 contiguous amino acids of the corresponding Timothy Grass amino acid sequence set forth in Table 1 (SEQ ID NOS 1-620), Table 2 (SEQ ID NOS 621-1442), Table 4 (SEQ ID NOS 1443-2264) or Table 6. Moreover, a subsequence may be 7 to 25 amino acids in length, such as 7 to 20; 8 to 30; 8 to 25; 8 to 20; 9 to 30; 9 to 25; 9 to 20; to 30; 10 to 25; 10 to 30 amino acids in length and wherein at least 8, such as at least 9, 10, 11, 12, 13, 14 or 15 amino acids of the subsequence has at least 75%, such as at least 80%, 85%, 90% identity or homology to at least 8, such as at least 9, 10, 11, 12, 13, 14 or 15 amino acids, respectively, contiguous amino acids of said corresponding Timothy Grass amino acid sequence set forth in Table 1 (SEQ ID NOS 1-620), Table 2 (SEQ ID NOS 621-1442), Table 4 (SEQ ID NOS 1443-2264) or Table 6. In various aspects, a protein or peptide does not consist of a sequence set forth in Table 1 as SEQ ID NOs:204, 205, 206, 207, 208, 209, 210, 211, 212, 213, 282, 283, 284, 285, 286, 287, 289, 290, 291, 292, 293, 294, 295, 296, 489, 490 and/or 491.

[0039] In additional particular embodiments, a protein or peptide includes, consists of or consists essentially of an amino acid sequence set forth in Table 2 (SEQ ID NOS 621-1442), Table 4 (SEQ ID NOS 1443-2264), Table 6 or a variant or derivative thereof. A variant may be a longer peptide, for example, of up to 30 amino acids in length and which includes a corresponding amino acid sequence as set forth in Table 2 (SEQ ID NOS 621-1442), Table 4 (SEQ ID NOS 1443-2264) or Table 6. A variant may also include a peptide of 7 to 30 amino acids in length and which includes a subsequence of at least 7 amino acids having at least 75% identity or homology, such as at least 80 or 85% identity or homology, to at least 7 contiguous amino acids of the corresponding amino acid sequence set forth in Table 2 (SEQ ID NOS 621-1442), Table 4 (SEQ ID NOS 1443-2264) or Table 6. A longer variant peptide may be up to 25 amino acids in length, such as up to 24, 23, 22, 21, 20, 19 or 19 amino acids in length. The variant may be a peptide of 7 to 25 amino acids in length, such as 7 to 20; 8 to 30; 8 to 25; 8 to 20; 9 to 30; 9 to 25; 9 to 20; 10 to 30; 10 to 25; 10 to 30 amino acids in length and wherein said subsequence is of at least 8, 9 or 10 amino acids having at least 75% (such as at least 80% or 85%) identity or homology to at least 8, 9 or 10 contiguous amino acids, respectively, of said corresponding amino acid sequence set forth in Table 2 (SEQ ID NOS 621-1442), Table 4 (SEQ ID NOS 1443-2264) or Table 6. In various aspects, a protein or peptide does not consist of sequences set forth in Table 4 as SEQ ID NOs:1517, 1542, 1598, 1679, 1761, 1849, 1850, 1851, 1935, 2040, 2116, 2133 and/or 2134.

[0040] As used herein, an “antigen” refers to a substance, including but not limited to a protein or peptide that elicits, induces, stimulates, promotes or enhances an immune response when administered to a subject. An immune response elicited by an antigen may include, but is not limited to, a B cell or a T cell response. An immune response can include a cellular response with a particular pattern of lymphokine/cytokine production (e.g., Th1, Th2), a humoral response (e.g., antibody production), or a combination thereof, to a particular antigen. For example, if a subject previously exposed to an allergen (i.e., is sensitized or is hypersensitive) comes into contact with the allergen again, allergic asthma may develop due to a Th2 response characterized by an increased production of type 2 cytokines (e.g., IL-4, IL-5, IL-9, and/or IL-13) secreted by CD4+ T lymphocytes.

[0041] As used herein an “epitope” refers to a region or part of an antigen that elicits an immune response when administered to a subject. In particular embodiments, an epitope may be comprised of a region or part of a Timothy grass protein or peptide (e.g, of all or a part of an amino acid sequence in Table 1 (SEQ ID NOS 1-620, respectively, in order of appearance), Table 2 (SEQ ID NOS 621-1442, respectively, in order of appearance), Table 4 (SEQ ID NOS 1443-2264, respectively, in order of appearance) or Table 6. In more particular embodiments, an epitope may be comprised of a region or part of a TG protein or peptide set forth in Table 1 (SEQ ID NOS 1-620, respectively, in order of appearance), Table 2 (SEQ ID NOS 621-1442, respectively, in order of appearance), Table 4 (SEQ ID NOS 1443-2264, respectively, in order of appearance) or Table 6. In particular aspects, an epitope is a T cell epitope, i.e., an epitope that elicits, stimulates, induces, promotes, increases or enhances a T cell activity, function or response.

[0042] An antigen, epitope, allergen, or composition thereof can modulate an undesired or abnormal inflammatory response. An antigen, epitope, allergen, or composition thereof as described herein may alter the Th2 response by, for example, shifting the immune response toward a Th1 phenotype that is less damaging. That is, an altered (or modulated) immune response can decrease, inhibit, suppress, or reduce sensitivity (desensitize) to an antigen, epitope, or allergen, or against inflammatory responses (e.g., allergy, asthma, rash, wheezing, coughing, eye irritation, etc.) caused by an antigen, epitope, or allergen (e.g., a TG protein or peptide set forth in Table 1 (SEQ ID NOS 1-620), Table 2 (SEQ ID NOS 621-1442), Table 4 (SEQ ID NOS 1443-2264) or Table 6).

[0043] Accordingly, non-limiting examples of antigens, allergens are peptides and proteins having defined amino acid sequences and which comprise T cell epitopes, i.e., elicit, stimulate, induce, promote, increase or enhance a T cell response or activity. Antigens and allergens can be analyzed to determine whether they include at least one T cell epitope using any number of assays (e.g. T cell proliferation assays, lymphokine secretion assays, T cell non-responsiveness studies, etc.).

[0044] The term “allergen” refers to an antigen which elicits, induces, stimulates, or enhances an immune response by a cell or the immune system of an exposed animal (e.g., human). An antigen is an allergen when the specific immune response is the development of enhanced sensitivity or a hypersensitivity to the antigen, but the antigen itself is not typically innately harmful. An allergen is therefore a particular type of antigen that can cause development of enhanced or increased sensitivity or hypersensitivity in a subject. For example, an allergen can elicit production of IgE antibodies in predisposed subjects. However, as disclosed herein an allergen need not elicit production of IgE antibodies. Other examples of responses elicited by allergens include T cell responses or activity, such as production of a lymphokine, cytokine, or effector function on other cells. Responses caused by allergens are also described, for example, in Mol. Biol. of Allergy and Immunology, ed. R. Bush, Immunology and Allergy Clinics of North American Series (August 1996). Although the terms “allergen” and “antigen” have a different meaning, reference to “allergen” herein includes reference to “antigen” and reference to “antigen” herein includes reference to “allergen.”

[0045] Typically, allergens are organic substances, such as proteins, peptides, nucleotides, carbohydrates, lipids, fats, nucleic acid, and combinations or mixtures thereof. Allergen(s) as used herein include, but are not limited to a specific allergen protein, mixture of allergen proteins, an extract of an allergen, chemically or genetically manufactured allergen, or any combination thereof (e.g., a TG protein or peptide set forth in Table 1 (SEQ ID NOS 1-620), Table 2 (SEQ ID NOS 621-1442), Table 4 (SEQ ID NOS 1443-2264) or Table 6).

[0046] In certain embodiments, proteins, peptides, subsequences, portions, homologues, variants and derivatives thereof, described herein (e.g., a TG protein or peptide set forth in Table 1 (SEQ ID NOS 1-620), Table 2 (SEQ ID NOS 621-1442), Table 4 (SEQ ID NOS 1443-2264) or Table 6) stimulate, induce, promote, increase or enhance an immune response. In particular embodiments, a protein or peptide is a T cell antigen, allergen or epitope. In additional particular embodiments, a protein or peptide, a subsequence, portion, homologue, variant or derivative thereof, elicit, stimulate, promote, induce or enhance a T cell response, which may include but is not limited to a Th2 cell response. In further particular embodiments, a TG protein or peptide, a subsequence, portion, homologue, variant or derivative thereof, modulates, inhibits, or reduces T cell response, which may include but is not limited to a Th2 cell response. In certain embodiments, a T cell response is an anti-allergen immune response, including but not limited to an anti-TG immune response.

[0047] As used herein, the term “immune response” includes T cell (cellular) mediated and/or B cell (humoral) mediated immune responses, or both cellular and humoral responses. Exemplary immune responses include T cell responses, e.g., lymphokine production, cytokine production and cellular cytotoxicity. T-cell responses include Th1 and/or Th2 responses. In addition, the term immune response includes responses that are indirectly effected by T cell activation, e.g., antibody production (humoral responses) and activation of cytokine responsive cells, e.g., eosinophils, macrophages. Immune cells involved in the immune response include lymphocytes, such as T cells (CD4+, CD8+, Th1 and Th2 cells, memory T cells) and B cells; antigen presenting cells (e.g., professional antigen presenting cells such as dendritic cells, macrophages, B lymphocytes, Langerhans cells, and non-professional antigen presenting cells such as keratinocytes, endothelial cells, astrocytes, fibroblasts, oligodendrocytes); natural killer (NK) cells; myeloid cells, such as macrophages, eosinophils, mast cells, basophils, and granulocytes.

[0048] As set forth herein, a particular immunoglobulin (Ig) isotype may be produced in response to an antigen (allergen). For example, an “IgG antigen” refers to an antigen that induces an IgG antibody response. Likewise, an “IgE antigen” refers to an antigen that induces an IgE antibody response; an “IgA antigen” refers to an antigen that induces an IgA antibody response, and so forth. In certain embodiments, such an immunoglobulin (Ig) isotype produced in response to an antigen may also elicit production of other isotypes. For example, an IgG antigen may induce an IgG antibody response in combination with one more of an IgE, IgA, IgM or IgD antibody response. Accordingly, in certain embodiments, an IgG antigen may induce an IgG antibody response without inducing an IgE, IgA, IgM or IgD antibody response.

[0049] The invention encompasses methods and uses for reducing, decreasing, preventing the development of sensitization or hypersensitization to an antigen(s) or allergen(s), such as a TG antigen or allergen. Accordingly, in other embodiments, a protein or peptide, subsequence, portion, homologue, variant or derivative thereof (e.g., a TG protein or peptide set forth in Table 1 (SEQ ID NOS 1-620), Table 2 (SEQ ID NOS 621-1442), Table 4 (SEQ ID NOS 1443-2264) or Table 6), decreases, inhibits, suppresses or reduces a T cell response, which may include but is not limited to a Th2 cell response. In certain embodiments, the T cell response is an anti-allergen immune response, such as a memory T cell response.

[0050] In accordance with another aspect of the invention there are provided a TG protein or peptide, a subsequence, portion, homologue, variant or derivative thereof, wherein the protein or peptide elicits, stimulates, induces, promotes, increases or enhances an anti-allergen immune response. In another aspect, there are provided a TG protein or peptide, subsequence, portion, homologue, variant or derivative thereof, wherein the protein or peptide decreases, reduces, inhibits, suppresses or disrupts an anti-allergen immune response.

[0051] As will be understood by a person of skill in the art, a protein or a subsequence, portion, homologue, variant or derivative thereof as described herein (e.g., a TG protein or peptide set forth in Table 1 (SEQ ID NOS 1-620), Table 2 (SEQ ID NOS 621-1442), Table 4 (SEQ ID NOS 1443-2264) or Table 6), may elicit, stimulate, induce, promote, increase or enhance certain elements of an anti-allergen immune response while decreasing, reducing, inhibiting, suppressing or reducing other elements of the anti-allergen response, either contemporaneously or sequentially. In one non-limiting example, a protein or a subsequence, portion, homologue, variant or derivative thereof (e.g., a TG protein or peptide set forth in Table 1 (SEQ ID NOS 1-620), Table 2 (SEQ ID NOS 621-1442), Table 4 (SEQ ID NOS 1443-2264) or Table 6) may elicit, stimulate, induce, promote, increase or enhance proliferation of regulatory T cells while decreasing, reducing, inhibiting, suppressing or reducing production of proinflammatory lymphokines/cytokines.

[0052] An “anti-allergen,” “anti-protein,” or “anti-peptide immune response” refers to an immune response that is particular or specific for the protein or peptide, e.g., allergen. In such instances, the response is specifically triggered (elicited, stimulated, increased, induced, or promoted) by the protein or peptide, e.g., allergen (e.g., a TG protein or peptide). Although an “anti-allergen” immune response is specifically triggered by a given allergen, the immune response itself can be characterized by general features of immune responses, such as T cell (cellular) and/or B cell (humoral) immune responses, as set forth herein.

[0053] As disclosed herein, a TG protein, peptide, subsequence, portion, homologue, variant or derivative thereof, may elicit, stimulate, induce, promote, increase or enhance immunological tolerance to an antigen, including an allergen (e.g., a TG protein or peptide set forth in Table 1 (SEQ ID NOS 1-620), Table 2 (SEQ ID NOS 621-1442), Table 4 (SEQ ID NOS 1443-2264) or Table 6). In certain embodiments, a TG protein, peptide, subsequence, portion, homologue, variant or derivative thereof, described herein may elicit, stimulate, induce, promote, increase or enhance immunological tolerance to an allergen. Thus in certain embodiments a protein, peptide, subsequence, portion, homologue, variant or derivative thereof, described herein may be effective in use or treatment (e.g., therapeutic) of an allergic reaction or allergic immune response, including but not limited to an allergic response following a secondary or subsequent exposure of a subject to an antigen or allergen. In particular embodiments, immunological tolerance elicited, stimulated, induced, promoted, increased or enhanced from use or administration of a TG protein, peptide, subsequence, portion, homologue, variant or derivative thereof, may involve modulation of T cell activity, including but not limited to CD4+ T cells, CD8+ T cells, Th1 cells, Th2 cells and regulatory T cells (Tregs), and memory T cells. For example, immunological tolerance elicited, stimulated, induced, promoted, increased or enhanced from use or administration of a TG protein, peptide, subsequence, portion, homologue, variant or derivative thereof (e.g., a TG protein or peptide set forth in Table 1 (SEQ ID NOS 1-620, respectively, in order of appearance), Table 2 (SEQ ID NOS 621-1442, respectively, in order of appearance), Table 4 (SEQ ID NOS 1443-2264, respectively, in order of appearance) or Table 6)-inflammatory lymphokines/cytokines produced by T cells. Thus, in accordance with certain aspects of the invention, there are provided TG proteins, peptides, subsequences, portions, homologues, variants and derivatives thereof, that elicit, stimulate, induce, promote, increase or enhance immunological tolerance to an antigen or allergen (e.g., a TG protein or peptide).

[0054] Accordingly, methods and uses of inducing immunological tolerance in a subject to an allergen are provided. In one embodiment, a method or use reduces occurrence, frequency, severity, progression, or duration of physiological conditions, disorders, illnesses, diseases, symptoms or complications caused by or associated an allergic response to the allergen in the subject. Thus, in various embodiments, inducing immunological tolerance can protect a subject against or treat a subject for an allergic response, allergic disorder or allergic disease, or one or more physiological conditions, disorders, illnesses, diseases, symptoms or complications caused by or associated with an allergen.

[0055] As disclosed herein, surprisingly TG proteins and antigens that elicit Th2 immune responses are not a priori IgE reactive. Thus, there are provided methods and uses of providing specific immunotherapy to a subject, in which a subject is administered an amount of a protein or peptide that is an IgG, IgA, IgM or IgD antigen. In a particular embodiment, a method or use includes administering to the subject an amount of a protein or peptide that is an IgG antigen.

[0056] In certain embodiments of the invention methods and uses, the allergen is a TG protein or peptide. In more particular embodiments, the allergen is an amino acid sequence of a protein or peptide set forth in Table 1 (SEQ ID NOS 1-620, respectively, in order of appearance), Table 2 (SEQ ID NOS 621-1442, respectively, in order of appearance), Table 4 (SEQ ID NOS 1443-2264, respectively, in order of appearance) or Table 6, or a subsequence, portion, homologue, variant or derivative thereof. In other non-limiting embodiments, the allergen includes, consists of or consists essentially of an amino acid sequence set forth in Table 1 (SEQ ID NOS 1-620), Table 2 (SEQ ID NOS 621-1442), Table 4 (SEQ ID NOS 1443-2264) or Table 6.

[0057] In other embodiments of invention methods and uses, the allergen is not a Timothy grass protein or peptide. Non-limiting examples of such allergens include proteins and peptides from grass, trees, dust mites, insects, pollen, including but not limited to alder, Alternaria rot fungus, American cockroach, American house dust mite, Ash, Aspergillus fumigatus, Bermuda grass, Birch, Canary grass, Cat, Cladosporium herbarum, Common cypress, Cypress, Date palm, Dog, English plantain, European house dust mite, Giant ragweed, Japanese cypress, Kentucky blue grass, Lolium perenne, Orchard grass, Penicillium chrysogenum, Prickly juniper, Russian thistle, Rye grass, Sweet vernal grass or White oak.

[0058] An allergic reaction refers to a local or general reaction in a subject following contact with a specific antigen (e.g., allergen) to which the subject had been previously exposed and had become sensitized. The immunologic interaction of antigen (e.g., allergen) with sensitized lymphocytes (T cells) and/or antibody can give rise to inflammation and tissue damage. An allergy is an undesirable immune response or reaction that can therefore produce damage to self-tissues and cells, usually through inflammatory reactions.

[0059] One non-limiting example of an allergy is asthma. Asthma, which can be extrinsic or allergic asthma (also referred to as reactive airway disease), is an inflammatory disease of the lungs characterized by a generally reversible airway obstruction. Non-limiting features of allergic asthma include elevated concentrations of serum IgE, pulmonary eosinophilia, airway hyper-responsiveness, excessive airway mucus production, and airway remodeling marked by peribronchiolar collagen deposition and increases in airway smooth muscle mass. Other exemplary allergic reactions or inflammatory conditions include allergic alveolitis, allergic bronchopulmonary aspergillosis, allergic dermatitis, eczema, allergic conjunctivitis, allergic coryza, allergic vasculitis, rhinosinusitis, and allergic rhinitis.

[0060] Hypersensitivity or hyper-responsiveness used in reference to an immune response means an abnormal response or condition in which an antigen or allergen elicits an exaggerated immune response. For example, allergic asthma can result from repeated exposure to airborne allergens that trigger detrimental immunological responses, such as persistent inflammation in the bronchial wall, which can in turn cause structural and functional changes in the respiratory system. After allergen contact by sensitized subjects (i.e., those subjects that have already been exposed to the allergen), the immune response is dependent on CD4+ T lymphocytes that are skewed to a T helper (Th) 2 phenotype. Th2 cytokines, for example, IL-4, IL-5, IL-9, and IL-13 are produced and are believed to contribute to asthma pathogenesis. For example, IL-4 drives the T helper response in favor of Th2, resulting in enhanced production of IgE; IL-5, which with granulocyte macrophage colony stimulating factor (GM-CSF) and IL-3, is important for the production of eosinophils; and IL-13, which is required for airway hyper-responsiveness and mucous metaplasia, which are downstream pathophysiological features that are closely linked with clinical asthma. All of these cytokines, together with TGF-beta have been implicated in airway remodeling. Increased numbers of airway eosinophils is also associated with disease severity, although the role of eosinophils in the pathology of asthma is not entirely understood, (see, e.g., Lee et al., Science 305:1773 (2004); Humbles et al., Science 305:1776 (2004)). The resulting structural and morphometric changes (remodeling) include subepithelial fibrosis, goblet cell hyperplasia and metaplasia, which result in functional consequences such as loss of distensibility of asthmatic airways, bronchial hyper-reactivity (even in the absence of the allergen), and an accelerated progressive decrease in forced expiratory volume at 1 second time intervals. Th2 cytokines may also prime and activate eosinophils to release proinflammatory agents, lipid mediators, and other cytokines thought to contribute to the observed tissue damage, remodeling, and hyper-responsiveness.

[0061] As used herein, the term “tolerance,” “anergy,” or “antigen (allergen)-specific tolerance” refers to a reduction, loss, inhibition, suppression or decrease, of T cells to T cell receptor-mediated stimulation by an allergen or antigen. The reduction can lead to educed or non-responsiveness (insensitivity) of T cells to an allergen or antigen. Such insensitivity is generally antigen-specific and persists after exposure to the antigenic peptide has ceased. For example, tolerance in T cells is characterized by lack of lymphokine/cytokine production, e.g., IL-2, IFN-γ, or TNF-β. T-cell anergy occurs when T cells are exposed to antigen or allergen and receive a first signal (a T cell receptor or CD-3 mediated signal) in the absence of a second signal (a costimulatory signal). Under these conditions, re-exposure of the cells to the same antigen or allergen (even if re-exposure occurs in the presence of a costimulatory molecule) results in failure to produce cytokines and subsequently failure of T cells to proliferate. Thus, a failure to produce lymphokines/cytokines prevents proliferation. Tolerized T cells can, however, proliferate if cultured with cytokines (e.g., IL-2). For example, T cell anergy can also be observed by the lack of IL-2 production by T lymphocytes as measured by ELISA or by a proliferation assay using an indicator cell line.

[0062] As used herein, the term “immunological tolerance” refers to a) a decreased or reduced level of a specific immunological response (thought to be mediated at least in part by antigen-specific effector T lymphocytes, B lymphocytes, antibody, a combination); b) a delay in the onset or progression of a specific immunological response; or c) a reduced risk of the onset or progression of a specific immunological response to an antigen or allergen. “Specific” immunological tolerance occurs when tolerance is preferentially invoked against certain antigens (allergens) in comparison with other antigens (allergens). Tolerance is an active antigen dependent process and differs from non-specific immunosuppression and immunodeficiency.

[0063] An increase, improvement, enhancement or induction of “tolerance” refers to a decrease, reduction, inhibition, suppression, or limiting or controlling or clearing of specific immunological reactivity to an antigen as compared to reactivity to the antigen in a previous exposure to the same antigen. Thus in certain embodiments, a method or use of inducing immunological tolerance in a subject to an allergen includes elimination of an allergic response of the subject to the allergen. Immunological tolerance in a subject to an allergen can also be reflected by reducing the occurrence, frequency, severity, progression, or duration of an allergic response of the subject to the antigen or allergen.

[0064] While desirably tolerance can refer to non-reactivity to an antigen or allergen, tolerance need not be complete non-reactivity and can only be partial, and in any event is reflected by a decrease, inhibition, suppression or reduction in specific immunological reactivity to an antigen or allergen as compared to reactivity to the antigen or allergen in a previous exposure to the same antigen or allergen (or epitope thereof). Thus, in another embodiment, a method or use of inducing immunological tolerance in a subject to an allergen includes stabilizing or maintaining the level of an allergic response in the subject to the allergen.

[0065] Induction of immune tolerance (also referred to as desensitization), and the relative amount of immune tolerance, can be measured by methods disclosed herein or known to the skilled artisan. For example, induction of immune tolerance can be measured by modulation of lymphokine and/or cytokine level in said animal. As such, modulation can be an increase of a cytokine level, for instance an increase of a cytokine level at least 1.5, 2, 3 times or more relative to before said induction. Alternatively, modulation can be a decrease of the level of a particular cytokine level, for instance a decrease of the cytokine level is at least 1.5, 2, 3 times or more relative to before said induction. The lymphokines/cytokines chosen to measure can be from any relevant lymphokines/cytokines, such as IL-2, IL-5, IL-4, IL-6, IL-10, IL-12, IL-13, TNF-α, IFN-γ, IFN-α, TGF-β, MCP-1, RANK-L and Flt3L.

[0066] As disclosed herein, peptides and proteins of the invention are useful in methods and uses, for example, of “specific” immunotherapy. The term “specific” immunotherapy refers to a therapy particular or specific for the protein or peptide, e.g., allergen. To achieve “specific immunotherapy” an antigen is administered to a subject in order to achieve immunological tolerance of the subject to an antigen, including for example, an allergen.

[0067] More particularly, specific immunotherapy may be conducted by administering an antigen derived from the antigen (e.g. allergen) against which immunological tolerance is sought. Alternatively, immunotherapy can be conducted by “non-specific” immunotherapy using a different antigen or protein than the antigen against which immunological tolerance is sought. For example as described in US patent application publication US2012/0100164A1, which relates to the treatment of a hypersensitivity immune response, such as allergic rhinitis or asthma, via bystander suppression by use of an antigen unrelated to the allergen triggering the hypersensitivity immune response in an individual to be treated provided that the antigen is obtainable from the source material, e.g. Grass pollen, comprising the “triggering” allergen (e.g. Phl p 1, 5 or 6).

[0068] Thus, in different embodiments, the TG antigen administered and antigen (e.g. allergen) against which immunological tolerance is sought may be the same or a different TG protein. In one embodiment, a method or use includes administering to a subject an amount of a TG protein or peptide, or subsequence, portion, homologue, variant or derivative thereof sufficient to elicit, stimulate, induce, promote, increase, enhance or augment immunological tolerance to an allergen in the subject. In one aspect, a TG antigen is administered to a subject during specific immunotherapy to treat the subject for an allergic reaction to the same TG antigen. In a different aspect, a TG antigen is administered to a subject during specific immunotherapy to treat the subject for an allergic reaction to a different TG antigen. In another embodiment, a method includes administering to a subject an amount of a nucleic acid encoding all or a portion (e.g., a T cell epitope) of a Timothy grass protein or peptide, or subsequence, portion, homologue, variant or derivative thereof sufficient to elicit, stimulate, induce, promote, increase, enhance or augment immunological tolerance to an allergen in the subject. In various embodiments, a method or use of specific immunotherapy reduces, inhibits, suppresses or decreases sensitivity or (hyper)sensitivity to the protein or peptide, e.g., allergen, or elicits, stimulates, increases, induces, promotes or improves tolerance of the protein or peptide, e.g., allergen. Typically a subject is administered a protein or peptide, e.g., allergen, for example, via a subcutaneous injection.

[0069] Methods and uses include multi-dose regimens. For example, a method or use can begin with small doses of allergen, and the doses are increased for repeated contact or administration.

[0070] A variant or derivative of an antigen (e.g., a TG protein or peptide set forth in Table 1 (SEQ ID NOS 1-620), Table 2 (SEQ ID NOS 621-1442), Table 4 (SEQ ID NOS 1443-2264) or Table 6), including an allergen as described herein, or a subsequence or portion of an antigen or allergen, include molecules that are structurally similar and functionally similar (e.g, of all or a part of an amino acid sequence in Table 1 (SEQ ID NOS 1-620, respectively, in order of appearance), Table 2 (SEQ ID NOS 621-1442, respectively, in order of appearance), Table 4 (SEQ ID NOS 1443-2264, respectively, in order of appearance) or Table 6). A variant, derivative or subsequence of antigen or allergen is functionally similar to the antigen or allergen sequence if the variant, derivative or subsequence is capable of eliciting a detectable or measurable immune response, even if it is a reduced immune response compared to the nonvariant/non-derived or native sequence, which may be determined using methods, including animal models and in vitro assays, described herein and know to one of skill in the art. For example, an immune response may be determined by quantitative and/or qualitative determination of lymphokine/cytokine production (e.g., by T cells), antibody production (including class and/or isotype), cellular mobilization, migration or motility, and optionally in vivo, such as an animal model of antigen/allergen immune responsiveness. An immune response of variant, derivative or subsequence of antigen or allergen compared to the non-variant/non-derivatized/native full length antigen or allergen may be ascertained by analysis of a particular measure (such as lymphokine/cytokine production, immunoglobulin production, cell mobilization, migration, motility, etc.) and may be greater, less than or comparable, e.g., within 5%, 10%, 15%, or 20% or 25% of the immune response of non-variant/non-derivatized/native full length antigen or allergen. For example, levels of Th1 lymphokines/cytokines, such as IFN-γ IL-2, and TNF-β and Th2 cytokines, such as IL-4, IL-5, IL-9, IL-10, and IL-13, may be determined according to methods described herein or known to one of skill in the art.

[0071] As disclosed herein, proteins and peptides, or a subsequence, portion, homologue, variant or derivative thereof include those having all or at least partial sequence identity to one or more exemplary proteins and peptides, or a subsequence, portion, homologue, variant or derivative thereof (e.g., TG sequences set forth in Table 1 (SEQ ID NOS 1-620), Table 2 (SEQ ID NOS 621-1442,), Table 4 (SEQ ID NOS 1443-2264) or Table 6). The term “identity” and “identical” and grammatical variations thereof, mean that two or more referenced entities are the same (e.g., peptides or polynucleotide molecules). Thus, where two proteins, peptides, subsequences, portions, homologues, variants or derivatives thereof are identical, they have the same amino acid sequence. The identity can be over a defined area (region or domain) of the sequence. “Areas, regions or domains” of homology or identity mean that a portion of two or more referenced entities share homology or are the same.

[0072] Identity can be determined by comparing each position in aligned sequences. A degree of identity between amino acid sequences is a function of the number of identical or matching amino acids at positions shared by the sequences, i.e. over a specified region. Optimal alignment of sequences for comparisons of identity may be conducted using a variety of algorithms, as are known in the art, including the ClustalW program, available at http://clustalw.genome.ad.jp, the local homology algorithm of Smith and Waterman, 1981, Adv. Appl. Math 2: 482, the homology alignment algorithm of Needleman and Wunsch, 1970, J. Mol. Biol. 48:443, the search for similarity method of Pearson and Lipman, 1988, Proc. Natl. Acad. Sci. USA 85: 2444, and the computerized implementations of these algorithms (such as GAP, BESTFIT, FASTA and TFASTA in the Wisconsin Genetics Software Package, Genetics Computer Group, Madison, Wis., U.S.A.). Sequence identity may also be determined using the BLAST algorithm, described in Altschul et al., 1990, J. Mol. Biol. 215:403-10 (using the published default settings). Software for performing BLAST analysis may be available through the National Center for Biotechnology Information (through the internet at http://www.ncbi.nlm.nih.gov/). Such algorithms that calculate percent sequence identity (homology) generally account for sequence gaps and mismatches over the comparison region or area. For example, a BLAST (e.g., BLAST 2.0) search algorithm (see, e.g., Altschul et al., J. Mol. Biol. 215:403 (1990), publicly available through NCBI) has exemplary search parameters as follows: Mismatch-2; gap open 5; gap extension 2. For polypeptide sequence comparisons, a BLASTP algorithm is typically used in combination with a scoring matrix, such as PAM100, PAM 250, BLOSUM 62 or BLOSUM 50. FASTA (e.g., FASTA2 and FASTA3) and SSEARCH sequence comparison programs are also used to quantitate the extent of identity (Pearson et al., Proc. Natl. Acad. Sci. USA 85:2444 (1988); Pearson, Methods Mol Biol. 132:185 (2000); and Smith et al., J. Mol. Biol. 147:195 (1981)). Programs for quantitating protein structural similarity using Delaunay-based topological mapping have also been developed (Bostick et al., Biochem Biophys Res Commun. 304:320 (2003)).

[0073] As described herein, TG proteins and peptides include homologues of TG proteins and peptides (e.g., of allor a part of any amino acid sequence in any of Table 1 (SEQ ID NOS 1-620), Table 2 (SEQ ID NOS 621-1442), Table 4 (SEQ ID NOS 1443-2264) or Table 6. A polypeptide sequence or polynucleotide sequence is a “homologue” of, or is “homologous” to, another sequence if the two sequences have substantial identity over a specified region and a functional activity of the sequences is preserved or conserved, at least in part (as used herein, the term ‘homologous’ does not infer nor exclude evolutionary relatedness).

[0074] Examples of “homologues” of invention peptides and proteins include proteins or peptides of non-Timothy grass allergens, including for example other grass allergens such as grasses of the order Poales, that are homologous to a Timothy grass peptide or protein described herein. For example, in particular embodiments, proteins or peptides of the present invention may be proteins or peptides of grasses of the order of Poales, Panicum virgatum, Zea mays, Oryza sativa, Ricinus communis, Alnus glutinosa, Spinacia oleracea, Sorghum bicolor, Arabidopsis thaliana, Triticum aestivum, Capsella bursa-pastoris, Brassica napus, Mesembryanthemum crystallinum, Gossypium hirsutum, Brassica rapa subsp. chinensis, Solanum lycopersicum, Solanum tuberosum, Populus trichocarpa or Chara coralline.

[0075] Accordingly, in particular embodiments, methods and uses of the invention include homologues of peptides and proteins from non-Timothy grass allergens, including for example other grass antigens and allergens, such non-TG proteins and peptides considered to be homogoues as set forth herein. Thus, as a non-limiting example, peptide and protein homologues from non-Timothy grass antigens or allergens may be administered to modulate immune activity or immune response against a Timothy grass allergen or antigen or to treat an allergic reaction, allergic response, allergic disorder or allergic disease associated with a Timothy grass allergen or antigen. As another non-limiting example, peptide and protein homologues from non-Timothy grass antigens or allergens may be administered to modulate immune activity or immune response against a non-Timothy grass allergen or antigen or to treat an allergic reaction, allergic response, allergic disorder or allergic disease associated with a non-Timothy grass allergen or antigen.

[0076] Two polypeptide sequences or polynucleotide sequences are considered to be substantially identity if, when optimally aligned (with gaps permitted), they share at least about 40% sequence identity or greater (e.g. 45%, 50%, 55%, 60%, 65%, 70%, 75%, 80%, 85%, 90%, 95%, 96%, 97%, 98%, 99%, etc. identify over a specific region), for example, over all or a part of any amino acid sequence in Table 1 (SEQ ID NOS 1-620), Table 2 (SEQ ID NOS 621-1442), Table 4 (SEQ ID NOS 1443-2264) or Table 6, or if the sequences share defined functional motifs (e.g., epitopes). The percent identity can extend over the entire sequence length or a portion of the sequence (e.g., over all or a part of any amino acid sequence in any of Table 1 (SEQ ID NOS 1-620), Table 2 (SEQ ID NOS 621-1442), Table 4 (SEQ ID NOS 1443-2264) or Table 6. In particular aspects, the length of the sequence sharing the percent identity is 2, 3, 4, 5 or more contiguous amino acids, e.g., 6, 7, 8, 9, 10, 11, 12, 13, 14, 15, 16, 17, 18, 19, 20, etc. contiguous amino acids (e.g., over all or a part of any amino acid sequence in any of Table 1 (SEQ ID NOS 1-620), Table 2 (SEQ ID NOS 621-1442), Table 4 (SEQ ID NOS 1443-2264) or Table 6. In additional particular aspects, the length of the sequence sharing the percent identity is 20 or more contiguous amino acids, e.g., 20, 21, 22, 23, 24, 25, 26, 27, 28, 29, 30, 31, 32, 33, 34, 35, etc. contiguous amino acids (e.g., over all or a part of any amino acid sequence in any of Table 1 (SEQ ID NOS 1-620), Table 2 (SEQ ID NOS 621-1442), Table 4 (SEQ ID NOS 1443-2264) or Table 6. In further particular aspects, the length of the sequence sharing the percent identity is 35 or more contiguous amino acids, e.g., 35, 36, 37, 38, 39, 40, 41, 42, 43, 44, 45, 45, 47, 48, 49, 50, etc., contiguous amino acids (e.g., over all or a part of any amino acid sequence in any of Table 1 (SEQ ID NOS 1-620), Table 2 (SEQ ID NOS 621-1442), Table 4 (SEQ ID NOS 1443-2264) or Table 6. In yet further particular aspects, the length of the sequence sharing the percent identity is 50 or more contiguous amino acids, e.g., 50-55, 55-60, 60-65, 65-70, 70-75, 75-80, 80-85, 85-90, 90-95, 95-100, etc. contiguous amino acids (e.g., over all or a part of any amino acid sequence in any of Table 1 (SEQ ID NOS 1-620), Table 2 (SEQ ID NOS 621-1442), Table 4 (SEQ ID NOS 1443-2264) or Table 6.

[0077] An “unrelated” or “non-homologous” sequence shares less than 30% identity. More particularly, shares less than about 25% identity, with a protein, peptide or polynucleotide of the invention over a specified region of homology.

[0078] A variant or derivative of a protein or peptide refers to a modified or variant form of the protein or peptide, or subsequence, portion or homologue thereof (e.g., over all or a part of any amino acid sequence in any of Table 1 (SEQ ID NOS 1-620), Table 2 (SEQ ID NOS 621-1442), Table 4 (SEQ ID NOS 1443-2264) or Table 6). Such modified forms, such as amino acid deletions, additions and substitutions, of the proteins and peptides can also be used in the invention uses, methods and compositions, including methods for modulating an immune response, eliciting, stimulating, inducing, promoting, increasing, or enhancing immunological tolerance and protecting and treating subjects against an allergic reaction or response, as set forth herein.

[0079] Thus, in accordance with the invention, modified, variant and derivative forms of proteins and peptides, subsequences, portions, and homologues thereof (e.g., of a TG protein or peptide set forth in Table 1 (SEQ ID NOS 1-620), Table 2 (SEQ ID NOS 621-1442), Table 4 (SEQ ID NOS 1443-2264) or Table 6) are provided that have one or more functions or activities of unmodified, non-variant and non-derivatized forms of proteins and peptides. Such forms, referred to as “modifications”, “variants” or “derivatives” and grammatical variations thereof deviate from a reference sequence. For example, as described herein, a protein, peptide, subsequence, portion, or homologue thereof may comprise, consist or consist essentially of an amino acid sequence that is a modification, variant, or derivative of a TG protein or an amino acid sequence set forth in Table 1 (SEQ ID NOS 1-620), Table 2 (SEQ ID NOS 621-1442), Table 4 (SEQ ID NOS 1443-2264) or Table 6. Such modifications, variants, or derivatives may have greater or less activity or function than a reference protein or peptide, such as ability to elicit, stimulate, induce, promote, increase, enhance, activate, modulate, inhibit, decreases, suppress, or reduce an immune response (e.g. a T cell response) or elicit, stimulate, induce, promote, increase or enhance immunological tolerance (desensitize) to an antigen or allergen. Thus, proteins, peptides, or subsequences, portions or homologues thereof include sequences having substantially the same, greater or less relative activity or function as a reference antigen or allergen (e.g., any of the TG proteins or peptides set forth in any of Table 1 (SEQ ID NOS 1-620), Table 2 (SEQ ID NOS 621-1442), Table 4 (SEQ ID NOS 1443-2264) or Table 6) for example, an ability to elicit, stimulate, induce, promote, increase, enhance, activate, modulate, inhibit, suppress, decrease or reduce an immune response (e.g. a T cell response) or elicit, stimulate, induce, promote, increase or enhance immunological tolerance to an antigen or allergen in vitro or in vivo.

[0080] A variant or derivative therefore includes deletions, including truncations and fragments; insertions and additions, including tagged polypeptides and fusion proteins; substitutions, for example conservative substitutions, site-directed mutants and allelic variants; and modifications, including peptoids having one or more non-amino acyl groups (q.v., sugar, lipid, etc.) covalently linked to the peptide and post-translational modifications.

[0081] Non-limiting examples of modifications include one or more amino acid substitutions (e.g., 1, 2, 3, 4, 5, 6, 7, 8, 9, 10, 11, 12, 13, 14, 15, 16, 17, 18, 19, 20, 20-25, 25-30, 30-50, 50-100, or more residues), additions and insertions (e.g., 1, 2, 3, 4, 5, 6, 7, 8, 9, 10, 11, 12, 13, 14, 15, 16, 17, 18, 19, 20, 20-25, 25-30, 30-50, 50-100, or more residues) and deletions (e.g., 1, 2, 3, 4, 5, 6, 7, 8, 9, 10, 11, 12, 13, 14, 15, 16, 17, 18, 19, 20, 20-25, 25-30, 30-50, 50-100) of a reference protein, peptide, or subsequence or portion thereof (e.g., over all or a part of any amino acid sequence in any of Table 1 (SEQ ID NOS 1-620), Table 2 (SEQ ID NOS 621-1442), Table 4 (SEQ ID NOS 1443-2264) or Table 6). In particular embodiments, a modified or variant sequence retains at least part of a function or an activity of unmodified sequence, and can have less than, comparable, or greater, but at least a part of, a function or activity of a reference sequence, for example, the ability elicit, stimulate, induce, promote, increase, enhance, activate, modulate, inhibit, suppress, decrease, or reduce an immune response (e.g. a T cell response) or elicit, stimulate, induce, promote, increase or enhance immunological tolerance to an allergen. Such immune responses include, for example, among others, induced, increased, enhanced, stimulated, activated, modulated, inhibited, suppressed, decreased or reduced expression, production or activity of a cytokine (e.g., IL-5), an antibody (e.g. increase production of IgG antibodies, decrease production of IgE) or an immune cell (e.g. CD4+ T cell, CD8+ T cell, Th1 cell, Th2 cell or regulatory T cell).

[0082] Variants and derivatives of proteins and peptides include naturally-occurring polymorphisms or allelic variants, strain variants, as well as synthetic proteins and peptides that contain a limited number of conservative amino acid substitutions of the amino acid sequence. A variety of criteria can be used to indicate whether amino acids at a particular position in a protein or peptide are similar. In making such changes, substitutions of like amino acid residues can be made on the basis of relative similarity of side-chain substituents, for example, their size, charge, hydrophobicity, hydrophilicity, and the like, and such substitutions may be assayed for their effect on the function of the peptide by routine testing.

[0083] Specific non-limiting examples of substitutions include conservative and non-conservative amino acid substitutions. A “conservative substitution” is the replacement of one amino acid by a biologically, chemically or structurally similar residue. Biologically similar means that the substitution does not destroy a biological activity. Structurally similar means that the amino acids have side chains with similar length, such as alanine, glycine and serine, or a similar size. Chemical similarity means that the residues have the same charge, or are both hydrophilic or hydrophobic. For example, a conservative amino acid substitution is one in which an amino acid residue is replaced with an amino acid residue having a similar side chain, which include amino acids with basic side chains (e.g., lysine, arginine, histidine); acidic side chains (e.g., aspartic acid, glutamic acid); uncharged polar side chains (e.g., glycine, asparagine, glutamine, serine, threonine, tyrosine, cysteine, histidine); nonpolar side chains (e.g., alanine, valine, leucine, isoleucine, proline, phenylalanine, methionine, tryptophan); beta-branched side chains (e.g., threonine, valine, isoleucine), and aromatic side chains (e.g., tyrosine, phenylalanine, tryptophan). Particular examples include the substitution of one hydrophobic residue, such as isoleucine, valine, leucine or methionine for another, or the substitution of one polar residue for another, such as the substitution of arginine for lysine, glutamic for aspartic acids, or glutamine for asparagine, serine for threonine, and the like. Proline, which is considered more difficult to classify, shares properties with amino acids that have aliphatic side chains (e.g., Leu, Val, Ile, and Ala). In certain circumstances, substitution of glutamine for glutamic acid or asparagine for aspartic acid may be considered a similar substitution in that glutamine and asparagine are amide derivatives of glutamic acid and aspartic acid, respectively. Conservative changes can also include the substitution of a chemically derivatized moiety for a non-derivatized residue, for example, by reaction of a functional side group of an amino acid. Variants and derivatives of proteins and peptides include forms having a limited number of one or more substituted residues.

[0084] An addition can be a covalent or non-covalent attachment of any type of molecule. Specific examples of additions include glycosylation, acetylation, phosphorylation, amidation, formylation, ubiquitination, and derivatization by protecting/blocking groups and any of numerous chemical modifications. Additional specific non-limiting examples of an addition are one or more additional amino acid residues. Accordingly, proteins, peptides, subsequences, portions, homologues, variants or derivatives thereof, can be a part of or contained within a larger molecule, such as another protein or peptide sequence, such as a fusion or chimera with a different (distinct) sequence.

[0085] In particular embodiments, an addition is a fusion (chimeric) sequence, an amino acid sequence having one or more molecules not normally present in a reference native (wild type) sequence covalently attached to the sequence. The term “chimeric” and grammatical variations thereof, when used in reference to a sequence, means that the sequence contains one or more portions that are derived from, obtained or isolated from, or based upon other physical or chemical entities. For example, a chimera of two or more different proteins may have one part a protein, peptide, subsequence, portion, homologue or variant thereof, and a second part of the chimera may be from a different sequence, or unrelated protein sequence.

[0086] Another particular example of a sequence having an amino acid addition is one in which a second heterologous sequence, i.e., heterologous functional domain is attached (covalent or non-covalent binding) that confers a distinct or complementary function. Heterologous functional domains are not restricted to amino acid residues. Thus, a heterologous functional domain can consist of any of a variety of different types of small or large functional moieties. Such moieties include nucleic acid, peptide, carbohydrate, lipid or small organic compounds, such as a drug (e.g., an antiviral), a metal (gold, silver), and radioisotope. For example, a tag such as T7 or polyhistidine can be attached in order to facilitate purification or detection of a protein, peptide, etc. Accordingly, there are provided proteins, peptides, subsequences, portions and homologues thereof (e.g., a TG protein or peptide set forth in Table 1, Table 2, Table 4 or Table 6), and a heterologous domain, wherein the heterologous functional domain confers a distinct function on the protein, peptide, subsequence, portion or homologue thereof.

[0087] Linkers, such as amino acid or peptidomimetic sequences may be inserted between the sequence and the addition (e.g., heterologous functional domain) so that the two entities maintain, at least in part, a distinct function or activity. Linkers may have one or more properties that include a flexible conformation, an inability to form an ordered secondary structure or a hydrophobic or charged character, which could promote or interact with either domain Amino acids typically found in flexible protein regions include Gly, Asn and Ser. Other near neutral amino acids, such as Thr and Ala, may also be used in the linker sequence. The length of the linker sequence may vary without significantly affecting a function or activity of the fusion protein (see, e.g., U.S. Pat. No. 6,087,329). Linkers further include chemical moieties and conjugating agents, such as sulfo-succinimidyl derivatives (sulfo-SMCC, sulfo-SMPB), disuccinimidyl suberate (DSS), disuccinimidyl glutarate (DSG) and disuccinimidyl tartrate (DST).

[0088] Further non-limiting examples of additions are detectable labels. Thus, in another embodiment, the invention provides proteins, peptides, subsequences, portions and homologues thereof, that are detectably labeled. Specific examples of detectable labels include fluorophores, chromophores, radioactive isotopes (e.g., S³⁵, P³², I¹²⁵), electron-dense reagents, enzymes, ligands and receptors. Enzymes are typically detected by their activity. For example, horseradish peroxidase is usually detected by its ability to convert a substrate such as 3,3-′,5,5-′-tetramethylbenzidine (TMB) to a blue pigment, which can be quantified.

[0089] Another non-limiting example of an addition is an insertion of an amino acid within any protein, peptide, subsequence, portion or homologue thereof (e.g., any protein or sequence set forth herein, such as in any amino acid sequence of Table 1 (SEQ ID NOS 1-620), Table 2 (SEQ ID NOS 621-1442), Table 4 (SEQ ID NOS 1443-2264) or Table 6). In particular embodiments, an insertion is of one or more amino acid residues inserted into the amino acid sequence of a protein or peptide, or subsequence, portion or homologue thereof, such as any TG protein or sequence set forth herein, such as in as in Table 1 (SEQ ID NOS 1-620), Table 2 (SEQ ID NOS 621-1442), Table 4 (SEQ ID NOS 1443-2264) or Table 6.

[0090] Modified and variant proteins, peptides, subsequences, portions or homologues thereof also include one or more D-amino acids substituted for L-amino acids (and mixtures thereof), structural and functional analogues, for example, peptidomimetics having synthetic or non-natural amino acids or amino acid analogues and derivatized forms. Modifications include cyclic structures such as an end-to-end amide bond between the amino and carboxy-terminus of the molecule or intra- or inter-molecular disulfide bond. Proteins, peptides, subsequences, portions and homologues thereof may be modified in vitro or in vivo, e.g., post-translationally modified to include, for example, sugar residues, phosphate groups, ubiquitin, fatty acids, lipids, etc.

[0091] Specific non-limiting examples of modified and variant proteins, peptides, subsequences, portions and homologues thereof include proteins or peptides comprising, consisting or consisting essentially of an amino acid sequence comprising at least one amino acid deletion from a full length TG protein or amino acid sequence set forth in any of Table 1 (SEQ ID NOS 1-620), Table 2 (SEQ ID NOS 621-1442), Table 4 (SEQ ID NOS 1443-2264) or Table 6. In particular embodiments, a protein, peptide, or subsequence, portion or homologue thereof is from about 2 to up to one amino acid less than the full length protein sequence. In additional particular embodiments, a protein subsequence or portion is from about 2 to 5, 5 to 10, 10 to 15, 15 to 20, 20 to 25, 25 to 50, 50 to 100 amino acids in length, provided that said subsequence or portion is at least one amino acid less in length than the full-length protein sequence.

[0092] The term “subsequence” or “portion” means a fragment or part of the full length molecule. A subsequence or portion therefore consists of one or more amino acids less than the full length protein or peptide. A subsequence or portion can have one or more amino acids less than the full length protein or peptide internally or terminal amino acid deletions from either amino or carboxy-termini. Subsequences and portions can vary in size. For example, a subsequence or portion of a protein or peptide can be as small as an epitope capable of binding an antibody (i.e., about five amino acids) up to a polypeptide that is one amino acid less than the entire length of a reference protein or peptide.

[0093] As used herein, subsequences and portions may also include or consist of one or more amino acid additions or deletions, wherein the subsequence or portion does not comprise the full length native/wild type protein or peptide sequence. Accordingly, total subsequence or portion lengths can be greater than the length of the full length native/wild type protein or peptide, for example, where a protein or peptide subsequence is fused or forms a chimera with another polypeptide.

[0094] The invention provides isolated and/or purified proteins, peptides, subsequences, portions, homologues, variants or derivatives thereof. In particular embodiments, isolated and/or purified proteins, peptides, subsequences, portions, homologues, variants or derivatives thereof, comprise, consist of or consist essentially of an amino acid sequence of a TG protein or peptide set forth in any of Table 1 (SEQ ID NOS 1-620), Table 2 (SEQ ID NOS 621-1442), Table 4 (SEQ ID NOS 1443-2264) or Table 6. In particular embodiments, the isolated and/or purified proteins, peptides, subsequences, portions, homologues, variants or derivatives thereof include a T cell epitope (e.g., Th2 cell epitope).

[0095] The term “isolated,” when used as a modifier of a composition, means that the compositions are made by the hand of man or are separated, completely or at least in part, from their naturally occurring in vivo environment. Generally, isolated compositions are substantially free of one or more materials with which they normally associate with in nature, for example, one or more protein, nucleic acid, lipid, carbohydrate, cell membrane. The term “isolated” does not exclude alternative physical forms of the composition, such as fusions/chimeras, multimers/oligomers, modifications (e.g., phosphorylation, glycosylation, lipidation) or derivatized forms, or forms expressed in host cells produced by the hand of man.

[0096] An “isolated” composition (e.g., proteins, peptides, subsequences, portions, homologues, variants or derivatives thereof, for example, of any TG protein or sequence set forth herein, such as in any of Table 1 (SEQ ID NOS 1-620), Table 2 (SEQ ID NOS 621-1442), Table 4 (SEQ ID NOS 1443-2264) or Table 6) can also be “substantially pure” or “purified” when free of most or all of the materials with which it typically associates with in nature. Thus, an isolated protein, peptide, subsequence, portion, homologue, variant or derivative thereof, that also is substantially pure or purified does not include polypeptides or polynucleotides present among millions of other sequences, such as peptides of an peptide library or nucleic acids in a genomic or cDNA library, for example.

[0097] A “substantially pure” or “purified” composition can be combined with one or more other molecules. Thus, “substantially pure” or “purified” does not exclude combinations of compositions, such as combinations of proteins, peptides, subsequences, portions, homologues, variants or derivatives thereof (e.g., multiple proteins, peptides, subsequences, etc.), and other antigens, agents, drugs or therapies.

[0098] Proteins and peptide (e.g., antigens and allergens) can be prepared recombinantly, chemically synthesized, isolated from a biological material or source, and optionally modified, or any combination thereof. A biological material or source would include an organism that produced or possessed any proteins or peptide (e.g., antigen or allergen) set forth herein (e.g., as listed in any of Table 1 (SEQ ID NOS 1-620), Table 2 (SEQ ID NOS 621-1442), Table 3, Table 4 (SEQ ID NOS 1443-2264) or Table 6). A biological material or source may further refer to a preparation in which the morphological integrity or physical state has been altered, modified or disrupted, for example, by dissection, dissociation, solubilization, fractionation, homogenization, biochemical or chemical extraction, pulverization, lyophilization, sonication or any other means of manipulating or processing a biological source or material. Subsequences, variants, homologues and derivatives can be prepared, for example, by substituting, deleting or adding one or more amino acid residues in the amino acid sequence of a protein, peptide, subsequence, portion or homologue thereof, and screening for biological activity, for example eliciting an immune response. A skilled person will understand how to make such derivatives or variants, using standard molecular biology techniques and methods, described for example in Sambrook et al. (2001) Molecular Cloning: a Laboratory Manual, 3^{rd} ed., Cold Spring Harbour Laboratory Press).

[0099] The invention also provides protein or peptide (e.g., proteins, peptides, subsequences, portions, homologues, variants or derivatives thereof, for example, of any TG protein or sequence set forth herein, such as in as in Table 1 (SEQ ID NOS 1-620), Table 2 (SEQ ID NOS 621-1442), Table 4 (SEQ ID NOS 1443-2264) or Table 6, immobilized on or attached to a substrate. The protein or peptide (e.g., proteins, peptides, subsequences, portions, homologues, variants or derivatives thereof, for example, of any TG protein or sequence set forth herein, such as in as in Table 1 (SEQ ID NOS 1-620), Table 2 (SEQ ID NOS 621-1442), Table 4 (SEQ ID NOS 1443-2264) or Table 6 can optionally have a unique or distinct position or address on the substrate.

[0100] Substrates to which protein or peptide (e.g., proteins, peptides, subsequences, portions, homologues, variants or derivatives thereof, for example, of any TG protein or sequence set forth herein, such as in as in Table 1 (SEQ ID NOS 1-620), Table 2 (SEQ ID NOS 621-1442), Table 4 (SEQ ID NOS 1443-2264) or Table 6, can be immobilized or attached include essentially any physical entity such as a two dimensional surface that is permeable, semi-permeable or impermeable, either rigid or pliable and capable of either storing, binding to or having attached thereto or impregnated.

[0101] Substrates include dry solid medium (e.g., cellulose, polyester, nylon, or mixtures thereof etc.), such as glass, silica, plastic, polyethylene, polystyrene, polypropylene, polyacetate, polycarbonate, polyamide, polyester, polyurethane, or polyvinylchloride. Substrates include structures having sections, compartments, wells, containers, vessels or tubes, separated from each other to avoid or prevent cross-contamination or mixing with each other or with other reagents. Multi-well plates, which typically contain 6, 12, 26, 48, 96, to 1000 wells, are one particular non-limiting example of such a structure.

[0102] Substrates also include supports used for two- or three-dimensional arrays of sequences. The sequences are typically attached to the surface of the substrate (e.g., via a covalent bond) at defined positions (locations or addresses). Substrates can include a number of sequences, for example, 1, 2, 3, 4, 5, 5 to 10, 10 to 15, 15 to 20, 20 to 25, 25 to 30, 30 to 35, 35 to 40, 40 to 45, 45 to 50, 50 to 75, 75 to 100, 100 to 150, 150 to 200, 200 to 250, 250 to 300, up to all proteins, peptides, subsequences, portions, homologues, variants or derivatives thereof, such as in Table 1 (SEQ ID NOS 1-620), Table 2 (SEQ ID NOS 621-1442), Table 4 (SEQ ID NOS 1443-2264) or Table 6. Such substrates, also referred to as “arrays,” can have any protein density; the greater the density the greater the number of sequences that can be screened on a given chip. Substrates that include a two- or three-dimensional array of sequences, and individual protein sequences therein, may be coded in accordance with the invention.

[0103] The invention also provides nucleic acids encoding proteins, peptides, subsequences, portions, homologues, variants or derivatives thereof, for example, of amino acid sequences set forth in Table 1 (SEQ ID NOS 1-620), Table 2 (SEQ ID NOS 621-1442), Table 4 (SEQ ID NOS 1443-2264) or Table 6. Such nucleic acid sequences encode a sequence at least 40% or more (e.g., 45%, 50%, 55%, 60%, 65%, 70%, 75%, 80%, 85%, 90%, 95%, 96%, 97%, 98%, 99%) identical to an exemplary protein, peptide, subsequence, portion, homologue, variant or derivative thereof, for example, of any amino acid sequence set forth in Table 1 (SEQ ID NOS 1-620), Table 2 (SEQ ID NOS 621-1442), Table 4 (SEQ ID NOS 1443-2264) or Table 6. In an additional embodiment, a nucleic acid encodes a sequence having a modification, such as one or more amino acid additions (insertions), deletions or substitutions of protein, peptide, subsequence, portion, homologue, variant or derivative thereof, for example, of an amino acid sequence set forth in Table 1 (SEQ ID NOS 1-620), Table 2 (SEQ ID NOS 621-1442), Table 4 (SEQ ID NOS 1443-2264) or Table 6.

[0104] The terms “nucleic acid,” “polynucleotide” and “polynucleoside” and the like refer to at least two or more ribo- or deoxy-ribonucleic acid base pairs (nucleotides/nucleosides) that are linked through a phosphoester bond or equivalent. Nucleic acids include polynucleotides and polynucleosides. Nucleic acids include single, double or triplex, circular or linear, molecules. Exemplary nucleic acids include but are not limited to: RNA, DNA, cDNA, genomic nucleic acid, naturally occurring and non-naturally occurring nucleic acid, e.g., synthetic nucleic acid.

[0105] Nucleic acids can be of various lengths. Nucleic acid lengths typically range from about 20 bases to 20 Kilobases (Kb), or any numerical value or range within or encompassing such lengths, 10 bases to 10 Kb, 1 to 5 Kb or less, 1000 to about 500 bases or less in length. Nucleic acids can also be shorter, for example, 100 to about 500 bases, or from about 12 to 24, 24 to 45, 45 to 90, 90 to 250, or about 250 to 500 bases in length, or any numerical value or range or value within or encompassing such lengths. In particular aspects, a nucleic acid sequence has a length from about 10-20, 20-30, 30-50, 50-100, 100-150, 150-200, 200-250, 250-300, 300-400, 400-500, 500-1000, 1000-2000 bases, or any numerical value or range within or encompassing such lengths. Shorter nucleic acids are commonly referred to as “oligonucleotides” or “probes” of single- or double-stranded DNA. However, there is no upper limit to the length of such oligonucleotides.

[0106] Nucleic acid sequences further include nucleotide and nucleoside substitutions, additions and deletions, as well as derivatized forms and fusion/chimeric sequences (e.g., encoding recombinant polypeptide). For example, due to the degeneracy of the genetic code, nucleic acids include sequences and subsequences degenerate with respect to nucleic acids that encode proteins, peptides, subsequences, portions, homologues, variants or derivatives thereof, (e.g., substitutions, additions, insertions and deletions), for example, of amino acid sequences set forth in Table 1 (SEQ ID NOS 1-620), Table 2 (SEQ ID NOS 621-1442), Table 4 (SEQ ID NOS 1443-2264) or Table 6.

[0107] Nucleic acids can be produced using various standard cloning and chemical synthesis techniques. Techniques include, but are not limited to nucleic acid amplification, e.g., polymerase chain reaction (PCR), with genomic DNA or cDNA targets using primers (e.g., a degenerate primer mixture) capable of annealing to the encoding sequence. Nucleic acids can also be produced by chemical synthesis (e.g., solid phase phosphoramidite synthesis) or transcription from a gene. The sequences produced can then be translated in vitro, or cloned into a plasmid and propagated and then expressed in a cell (e.g., a host cell such as eukaryote or mammalian cell, yeast or bacteria, in an animal or in a plant).

[0108] Nucleic acid may be inserted into a nucleic acid construct in which expression of the nucleic acid is influenced or regulated by an “expression control element.” An “expression control element” refers to a nucleic acid sequence element that regulates or influences expression of a nucleic acid sequence to which it is operatively linked. Expression control elements include, as appropriate, promoters, enhancers, transcription terminators, gene silencers, a start codon (e.g., ATG) in front of a protein-encoding gene, etc.

[0109] An expression control element operatively linked to a nucleic acid sequence controls transcription and, as appropriate, translation of the nucleic acid sequence. Expression control elements include elements that activate transcription constitutively, that are inducible (i.e., require an external signal for activation), or derepressible (i.e., require a signal to turn transcription off; when the signal is no longer present, transcription is activated or “derepressed”), or specific for cell-types or tissues (i.e., tissue-specific control elements).

[0110] Nucleic acid can also be inserted into a plasmid for propagation into a host cell and for subsequent genetic manipulation. A plasmid is a nucleic acid that can be propagated in a host cell, plasmids may optionally contain expression control elements in order to drive expression of the nucleic acid encoding proteins, peptides, subsequences, portions, homologues, variants or derivatives thereof in the host cell. A vector is used herein synonymously with a plasmid and may also include an expression control element for expression in a host cell (e.g., expression vector). Plasmids and vectors generally contain at least an origin of replication for propagation in a cell and a promoter. Plasmids and vectors are therefore useful for genetic manipulation and expression of proteins, peptides, subsequences, portions, homologues, variants or derivatives thereof, for example, of amino acid sequences set forth in Table 1 (SEQ ID NOS 1-620), Table 2 (SEQ ID NOS 621-1442), Table 4 (SEQ ID NOS 1443-2264) or Table 6. Accordingly, vectors that include nucleic acids encoding or complementary to proteins, peptides, subsequences, portions, homologues, variants or derivatives thereof, for example, of amino acid sequences set forth in Table 1 (SEQ ID NOS 1-620), Table 2 (SEQ ID NOS 621-1442), Table 4 (SEQ ID NOS 1443-2264) or Table 6, are provided.

[0111] In accordance with the invention, there are provided particles (e.g., viral particles) and transformed host cells that express and/or are transformed with a nucleic acid that encodes and/or express proteins, peptides, subsequences, portions, homologues, variants or derivatives thereof, for example, of amino acid sequences set forth in Table 1 (SEQ ID NOS 1-620), Table 2 (SEQ ID NOS 621-1442), Table 4 (SEQ ID NOS 1443-2264) or Table 6. Particles and transformed host cells include but are not limited to virions, and prokaryotic and eukaryotic cells such as bacteria, fungi (yeast), plant, insect, and animal (e.g., mammalian, including primate and human, CHO cells and hybridomas) cells. For example, bacteria transformed with recombinant bacteriophage nucleic acid, plasmid nucleic acid or cosmid nucleic acid expression vectors; yeast transformed with recombinant yeast expression vectors; plant cell systems infected with recombinant virus expression vectors (e.g., cauliflower mosaic virus, CaMV; tobacco mosaic virus, TMV) or transformed with recombinant plasmid expression vectors (e.g., Ti plasmid); insect cell systems infected with recombinant virus expression vectors (e.g., baculovirus); and animal cell systems infected with recombinant virus expression vectors (e.g., retroviruses, adenovirus, vaccinia virus), or transformed animal cell systems engineered for stable expression. The cells may be a primary cell isolate, cell culture (e.g., passaged, established or immortalized cell line), or part of a plurality of cells, or a tissue or organ ex vivo or in a subject (in vivo).

[0112] The term “transformed” or “transfected” when used in reference to a cell (e.g., a host cell) or organism, means a genetic change in a cell following incorporation of an exogenous molecule, for example, a protein or nucleic acid (e.g., a transgene) into the cell. Thus, a “transfected” or “transformed” cell is a cell into which, or a progeny thereof in which an exogenous molecule has been introduced by the hand of man, for example, by recombinant DNA techniques.

[0113] The nucleic acid or protein can be stably or transiently transfected or transformed (expressed) in the host cell and progeny thereof. The cell(s) can be propagated and the introduced protein expressed, or nucleic acid transcribed. A progeny of a transfected or transformed cell may not be identical to the parent cell, since there may be mutations that occur during replication.

[0114] Expression of proteins, peptides, subsequences, portions, homologues, variants or derivatives thereof and nucleic acid in particles or introduction into target cells (e.g., host cells) can also be carried out by methods known in the art. Non-limiting examples include osmotic shock (e.g., calcium phosphate), electroporation, microinjection, cell fusion, etc. Introduction of nucleic acid and polypeptide in vitro, ex vivo and in vivo can also be accomplished using other techniques. For example, a polymeric substance, such as polyesters, polyamine acids, hydrogel, polyvinyl pyrrolidone, ethylene-vinylacetate, methylcellulose, carboxymethylcellulose, protamine sulfate, or lactide/glycolide copolymers, polylactide/glycolide copolymers, or ethylenevinylacetate copolymers. A nucleic acid can be entrapped in microcapsules prepared by coacervation techniques or by interfacial polymerization, for example, by the use of hydroxymethylcellulose or gelatin-microcapsules, or poly (methylmethacrolate) microcapsules, respectively, or in a colloid system. Colloidal dispersion systems include macromolecule complexes, nano-capsules, microspheres, beads, and lipid-based systems, including oil-in-water emulsions, micelles, mixed micelles, and liposomes.

[0115] Liposomes for introducing various compositions into cells are known in the art and include, for example, phosphatidylcholine, phosphatidylserine, lipofectin and DOTAP (e.g., U.S. Pat. Nos. 4,844,904, 5,000,959, 4,863,740, and 4,975,282; and GIBCO-BRL, Gaithersburg, Md.). piperazine based amphilic cationic lipids useful for gene therapy also are known (see, e.g., U.S. Pat. No. 5,861,397). Cationic lipid systems also are known (see, e.g., U.S. Pat. No. 5,459,127). Polymeric substances, microcapsules and colloidal dispersion systems such as liposomes are collectively referred to herein as “vesicles.” Accordingly, viral and non-viral vector means delivery into cells are included.

[0116] TG proteins, peptides, subsequences, portions, homologues, variants or derivatives thereof, for example, of TG amino acid sequences set forth in Table 1 (SEQ ID NOS 1-620), Table 2 (SEQ ID NOS 621-1442), Table 4 (SEQ ID NOS 1443-2264) or Table 6, are provided, can be employed in various methods and uses. Such methods and uses include, for example, administration in vitro and in vivo of one or more proteins, peptides, subsequences, portions, homologues, variants or derivatives thereof, such as the TG amino acid sequences set forth in Table 1 (SEQ ID NOS 1-620), Table 2 (SEQ ID NOS 621-1442), Table 4 (SEQ ID NOS 1443-2264) or Table 6, or subsequences, portions, homologues, variants or derivatives thereof. The methods and uses provided include methods and uses of modulating an immune response, including, among others, methods and uses of protecting and treating subjects against a disorder, disease; and methods and uses of providing specific immunotherapy; and methods and uses of diagnosis.

[0117] In particular embodiments, methods and uses include administration or delivery of a protein, peptide, subsequence, portion, homologue, variants or derivative thereof described herein (e.g., of any TG amino acid sequences set forth in Table 1 (SEQ ID NOS 1-620), Table 2 (SEQ ID NOS 621-1442), Table 4 (SEQ ID NOS 1443-2264) or Table 6) to modulate an immune response in a subject, including, for example, modulating an immune response to an allergen or antigen.

[0118] As used herein, the term “modulate,” means an alteration or effect on the term modified. For example, the term modulate can be used in various contexts to refer to an alteration or effect of an activity, a function, or expression of a polypeptide, gene or signaling pathway, or a physiological condition or response of an organism. In certain embodiments, modulating involves decreasing, reducing, inhibiting, suppressing or disrupting an immune response of a subject to an antigen or allergen. In other embodiments, modulating involves eliciting, stimulating, inducing, promoting, increasing or enhancing an immune response of a subject to an antigen or allergen. Thus, where the term “modulate” is used to modify the term “immune response against an allergen in a subject” this means that the immune response in the subject to the allergen is altered or affected (e.g., decreased, reduced, inhibited, suppressed, limited, controlled, prevented, elicited, promoted, stimulated, increased, induced, enhanced, etc.).

[0119] Methods and uses of modulating an immune response against an antigen or allergen as described herein may be used to provide a subject with protection against an allergic response or reaction to the allergen, or allergic disorder or allergic disease, or one or more physiological conditions, disorders, illnesses, diseases, symptoms or complications caused by or associated with the allergen. Accordingly, in other embodiments, methods and uses include administering a protein, peptide, subsequence, portion, homologue, variant or derivative thereof described herein (e.g., of any TG amino acid sequences set forth in Table 1 (SEQ ID NOS 1-620), Table 2 (SEQ ID NOS 621-1442), Table 4 (SEQ ID NOS 1443-2264) or Table 6) to protect or treat a subject against an allergic response, allergic disorder or allergic disease, or one or more physiological conditions, disorders, illnesses, diseases, symptoms or complications caused by or associated with an allergen. In still other embodiments, methods and uses include administering or delivering a protein, peptide, subsequence, portion, homologue, variant or derivative thereof described herein (e.g., of any TG amino acid sequences set forth in Table 1 (SEQ ID NOS 1-620), Table 2 (SEQ ID NOS 621-1442), Table 4 (SEQ ID NOS 1443-2264) or Table 6) to elicit, stimulate, induce, promote, increase or enhance immunological tolerance of a subject to an antigen or allergen.

[0120] In various embodiments, there are provided methods and uses of providing a subject with protection against an allergic response, allergic disorder or allergic disease, or one or more physiological conditions, disorders, illnesses, diseases, symptoms or complications caused by or associated with an allergen. In various aspects, a method or use includes administering to the subject an amount of a protein, peptide, subsequence, portion, homologue, variant or derivative thereof described herein (e.g., of any TG amino acid sequences set forth in Table 1 (SEQ ID NOS 1-620), Table 2 (SEQ ID NOS 621-1442), Table 4 (SEQ ID NOS 1443-2264) or Table 6) sufficient to provide the subject with protection against the allergic response, allergic disorder or allergic disease, or one or more physiological conditions, disorders, illnesses, diseases, symptoms or complications caused by or associated with the allergen.

[0121] Methods and uses of the invention include providing a subject with protection against an antigen or allergen, or one or more physiological conditions, disorders, illnesses, diseases, symptoms or complications caused by or associated with the exposure to the antigen or allergen, for example, vaccinating the subject to protect against an allergic response to the allergen, for example with any TG amino acid sequences set forth in Table 1 (SEQ ID NOS 1-620), Table 2 (SEQ ID NOS 621-1442), Table 4 (SEQ ID NOS 1443-2264) or Table 6. In certain embodiments, methods and uses include protecting the subject against an allergic response or reaction by inducing tolerance of the subject (desensitizing) to the allergen.

[0122] As used herein, the terms “protection,” “protect” and grammatical variations thereof, when used in reference to an allergic response or one or more physiological conditions, disorders, illnesses, diseases, symptoms or complications caused by or associated with the exposure to allergen, means preventing an allergic response, reaction, or one or more physiological conditions, disorders, illnesses, diseases, symptoms or complications caused by or associated with the exposure to the allergen, or reducing or decreasing susceptibility to an allergic response, reaction, or one or more physiological conditions, disorders, illnesses, diseases, symptoms or complications caused by or associated with the exposure to the allergen.

[0123] An allergic response includes but is not limited to an allergic reaction, hypersensitivity, an inflammatory response or inflammation. In certain embodiments allergic response may involve one or more of cell infiltration, production of antibodies, production of cytokines, lymphokines, chemokines, interferons and interleukins, cell growth and maturation factors (e.g., differentiation factors), cell proliferation, cell differentiation, cell accumulation or migration (chemotaxis) and cell, tissue or organ damage or remodeling. In particular aspects, an allergic response may include Allergic rhinitis; Onchocercal dermatitis; Atopic dermatitis; allergic conjunctivitis; Drug reactions; Nodules, eosinophilia, rheumatism, dermatitis, rashes, hives, and swelling (NERDS); esophageal and a gastrointestinal allergy.

[0124] Allergic responses can occur systemically, or locally in any region, organ, tissue, or cell. In particular aspects, an allergic response occurs in the skin, the upper respiratory tract, the lower respiratory tract, pancreas, thymus, kidney, liver, spleen, muscle, nervous system, skeletal joints, eye, mucosal tissue, gut or bowel.

[0125] Methods and uses herein include treating a subject for an allergic response, allergic disorder or allergic disease, as well as one or more physiological conditions, disorders, illnesses, diseases, symptoms or complications caused by or associated with an allergen. Such methods and uses include administering to a subject an amount of a protein, peptide, subsequence, portion, homologue, variant or derivative thereof described herein (e.g., any TG amino acid sequences set forth in Table 1 (SEQ ID NOS 1-620), Table 2 (SEQ ID NOS 621-1442), Table 4 (SEQ ID NOS 1443-2264) or Table 6) sufficient to treat the subject for the allergic response, allergic disorder or allergic disease, or one or more physiological conditions, disorders, illnesses, diseases, symptoms or complications caused by or associated with the allergen.

[0126] As will be understood by a person skilled in the art, treating an allergic response, allergic disorder or allergic disease, or one or more physiological conditions, disorders, illnesses, diseases, symptoms or complications caused by or associated with an allergen may include decreasing, reducing, inhibiting, suppressing, limiting, controlling or clearing an allergic response, an allergic disorder or allergic disease, or one or more physiological conditions, disorders, illnesses, diseases, symptoms or complications caused by or associated with the allergen. Thus in certain embodiments, a method or use of treating a subject for a an allergic response, allergic disorder or allergic disease, or one or more physiological conditions, disorders, illnesses, diseases, symptoms or complications caused by or associated with an allergen comprises elimination of the allergic response, allergic disorder or allergic disease, or one or more physiological conditions, disorders, illnesses, diseases, symptoms or complications caused by or associated with the allergen from a subject. In other embodiments, a method or use of treating a subject for an allergic response, allergic disorder or allergic disease, or one or more physiological conditions, disorders, illnesses, diseases, symptoms or complications caused by or associated with an allergen includes reducing occurrence, frequency, severity, progression, or duration of the allergic response, allergic disorder or allergic disease, or one or more physiological conditions, disorders, illnesses, diseases, symptoms or complications caused by or associated with the allergen in the subject. In yet another embodiment, a method or use of treating a subject for an allergic response, allergic disorder or allergic disease, or one or more physiological conditions, disorders, illnesses, diseases, symptoms or complications caused by or associated with an allergen, includes stabilizing the allergic response, allergic disorder or allergic disease, or one or more physiological conditions, disorders, illnesses, diseases, symptoms or complications caused by or associated with the allergen in a subject by preventing an increase in the occurrence, frequency, severity, progression, or duration of the allergic response, allergic disorder or allergic disease, or one or more physiological conditions, disorders, illnesses, diseases, symptoms or complications caused by or associated with contact of the subject with an allergen.

[0127] Methods and uses of the invention include treating or administering a subject previously exposed to an antigen or allergen. Thus, in certain embodiments, methods and uses are for treating or protecting a subject from an allergic response, allergic disorder or allergic disease, or one or more physiological conditions, disorders, illnesses, diseases, symptoms or complications caused by or associated with secondary or subsequent exposure to an antigen or allergen.

[0128] Physiological conditions, disorders, illnesses, diseases, symptoms or complications caused by or associated with an antigen/allergen treatable in accordance with the invention methods and uses include but are not limited to asthma, allergic asthma, bronchiolitis and pleuritis, Allergic rhinitis; Onchocercal dermatitis; Atopic dermatitis; allergic conjunctivitis; Drug reactions; Nodules, eosinophilia, rheumatism, dermatitis, rashes, hives, and swelling (NERDS); esophageal and a gastrointestinal allergy, Airway Obstruction, Apnea, Asbestosis, Atelectasis, Berylliosis, Bronchiectasis, Bronchiolitis, Bronchiolitis Obliterans Organizing Pneumonia, Bronchitis, Bronchopulmonary Dysplasia, Empyema, Pleural Empyema, Pleural Epiglottitis, Hemoptysis, Hypertension, Kartagener Syndrome, Meconium Aspiration, Pleural Effusion, Pleurisy, Pneumonia, Pneumothorax, Respiratory Distress Syndrome, Respiratory Hypersensitivity, Rhinoscleroma, Scimitar Syndrome, Severe Acute Respiratory Syndrome, Silicosis, Tracheal Stenosis, eosinophilic pleural effusions, Histiocytosis; chronic eosinophilic pneumonia; hypersensitivity pneumonitis; Allergic bronchopulmonary aspergillosis; Sarcoidosis; Idiopathic pulmonary fibrosis; pulmonary edema; pulmonary embolism; pulmonary emphysema; Pulmonary Hyperventilation; Pulmonary Alveolar Proteinosis; Chronic Obstructive Pulmonary Disease (COPD); Interstitial Lung Disease; and Topical eosinophilia.

[0129] Timothy grass proteins, peptides, subsequences, portions, homologues, variants and derivatives thereof, described herein may elicit, stimulate, induce, promote, increase or enhance immunological tolerance to an antigen, including an allergen. Methods and uses of the invention therefore further include inducing immunological tolerance of a subject to an antigen or allergen. Thus, for example, Timothy grass proteins, peptides, subsequences, portions, homologues, variants and derivatives thereof, described herein can be effective in treatment (e.g., therapeutic) of an allergic immune response, including but not limited to an allergic immune response following a secondary or subsequent exposure of a subject to an antigen. In one embodiment, a method or use includes administering to the subject an amount of a protein, peptide, subsequence, portion, homologue, variant or derivative thereof described herein (e.g., any TG amino acid sequences set forth in Table 1 (SEQ ID NOS 1-620), Table 2 (SEQ ID NOS 621-1442), Table 4 (SEQ ID NOS 1443-2264) or Table 6) sufficient to induce tolerance in the subject to the antigen or allergen. In particular aspects, the immunological tolerance elicited, stimulated, induced, promoted, increased or enhanced may involve modulation of T cell activity, including but not limited to CD4+ T cells, CD8+ T cells, Th1 cells, Th2 cells and regulatory T cells. For example, immunological tolerance elicited, stimulated, induced, promoted, increased or enhanced from administration of the Timothy grass proteins or peptides, or subsequence, portion, homologue, variant or derivative thereof, may involve modulation of the production or activity of pro-inflammatory or anti-inflammatory cytokines produced by T cells.

[0130] In additional embodiments, a method or use of inducing immunological tolerance in a subject to an allergen includes a reduction in occurrence, frequency, severity, progression, or duration of physiological conditions, disorders, illnesses, diseases, symptoms or complications caused by or associated an allergic response to the allergen in the subject. Thus, in certain embodiments, inducing immunological tolerance can protect a subject against or treat a subject for an allergic response, allergic disorder or allergic disease, or one or more physiological conditions, disorders, illnesses, diseases, symptoms or complications caused by or associated with an antigen or allergen.

[0131] Methods and uses of inducing immunological tolerance described herein may include eliciting, stimulating, inducing, promoting, increasing or enhancing an immune response. In certain embodiments, inducing immunological tolerance may include eliciting, stimulating, inducing, promoting, increasing or enhancing an immune response that decreases, reduces, inhibits, suppresses, limits, controls or clears an allergic response. For example, in certain embodiments inducing immunological tolerance may include eliciting, stimulating, inducing, promoting, increasing or enhancing proliferation or activity of regulatory T cells. In other embodiments, inducing immunological tolerance may include eliciting, stimulating, inducing, promoting, increasing or enhancing an immune response that promotes an allergic response. As will be understood by a person of skill in the art, a method or use that elicits, stimulates, induces, promotes, increases or enhances an immune response that promotes an allergic response may still induce immunological tolerance by also eliciting, stimulating, inducing, promoting, increasing or enhancing an immune response that decreases, reduces, inhibits, suppresses, limits, controls or clears an allergic response. In particular embodiments, inducing immunological tolerance includes eliciting, stimulating, inducing, promoting, increasing or enhancing an immune responses that decreases, reduces, inhibits, suppresses, limits, controls or clears an allergic response that is stronger than the immune response that promotes an allergic response. In other embodiments, inducing immunological tolerance includes eliciting, stimulating, inducing, promoting, increasing or enhancing more immune responses that decrease, reduce, inhibit, suppress, limit, controls or clear an allergic response than immune responses that promote an allergic response.

[0132] Methods and uses of the invention include treating a subject via specific immunotherapy. In one embodiment, a method or use includes administering to the subject an amount of a protein, peptide, subsequence, portion, homologue, variant or derivative thereof described herein (e.g., any TG amino acid sequences set forth in Table 1 (SEQ ID NOS 1-620), Table 2 (SEQ ID NOS 621-1442), Table 4 (SEQ ID NOS 1443-2264) or Table 6. In one aspect, an antigen (allergen) administered to a subject during specific immunotherapy to treat the subject is the same antigen (allergen) to which the subject has been sensitized or is hypersensitive (e.g., allergic). In another non-limiting aspect, an antigen (allergen) administered to a subject to treat the subject is a different antigen (allergen) to which the subject has been sensitized or is hypersensitive (e.g., allergic). Thus in different embodiments, the antigen administered and antigen (e.g., allergen) against which immunological tolerance is sought may be the same protein (antigen, allergen), may be proteins (antigens, allergens) of the same organism or may be proteins (antigens, allergens) of different organisms.

[0133] In accordance with the invention, methods and uses include therapeutic (following antigen/allergen exposure) and prophylactic (prior to antigen/allergen exposure) uses and methods. For example, therapeutic and prophylactic methods and uses of treating a subject for an allergic response, allergic disorder or allergic disease, or one or more physiological conditions, disorders, illnesses, diseases, symptoms or complications caused by or associated with an allergen, include but are not limited to treatment of a subject having or at risk of having an allergic response, allergic disorder or allergic disease, or one or more physiological conditions, disorders, illnesses, diseases, symptoms or complications caused by or associated with an allergen; treating a subject with an allergic response, allergic disorder or allergic disease, or one or more physiological conditions, disorders, illnesses, diseases, symptoms or complications caused by or associated with an allergen; and methods and uses of protecting a subject from an allergic response, allergic disorder or allergic disease, or one or more physiological conditions, disorders, illnesses, diseases, symptoms or complications caused by or associated with an antigen/allergen (e.g., provide the subject with protection against an allergic reaction to an allergen), to decrease or reduce the probability of an allergic response, allergic disorder or allergic disease, or one or more physiological conditions, disorders, illnesses, diseases, symptoms or complications caused by or associated with an allergen, in a subject and to decrease or reduce susceptibility of a subject to an allergic response, allergic disorder or allergic disease, or one or more physiological conditions, disorders, illnesses, diseases, symptoms or complications caused by or associated with an allergen, to inhibit or prevent an allergic response, allergic disorder or allergic disease, or one or more physiological conditions, disorders, illnesses, diseases, symptoms or complications caused by or associated with an allergen, in a subject. Accordingly, methods and uses can treat an allergic response, allergic disorder or allergic disease, or one or more physiological conditions, disorders, illnesses, diseases, symptoms or complications caused by or associated with an allergen, or provide a subject with protection from an allergic response, allergic disorder or allergic disease, or one or more physiological conditions, disorders, illnesses, diseases, symptoms or complications caused by or associated with an allergen (e.g., prophylactic protection).

[0134] As described herein, proteins, peptides, subsequences, portions, homologues, variants and derivatives thereof include T cell epitopes, such as Th2 cell epitopes. Accordingly, methods and uses of the invention include administering an amount of a protein, peptide, subsequence, portion, homologue, variant or derivative thereof (e.g., a T cell epitope) to a subject sufficient to provide the subject with protection against an allergic response, allergic disorder or allergic disease, or one or more physiological conditions, disorders, illnesses, diseases, symptoms or complications caused by or associated with an allergen. In another embodiment, a method includes administering an amount of a protein, peptide, subsequence, portion, homologue, variant or derivative thereof (e.g., a T cell epitope, such as a Th2 cell epitope) to a subject sufficient to treat, vaccinate or immunize the subject against an allergic response, allergic disorder or allergic disease, or one or more physiological conditions, disorders, illnesses, diseases, symptoms or complications caused by or associated with an allergen.

[0135] In accordance with the invention, methods and uses of modulating anti-allergen activity of T cells, including but not limited to CD8⁺ T cells, CD4⁺ T cells, Th1 cells or Th2 cells, in a subject are provided. In one embodiment, a method or use includes administering to a subject an amount of a protein, peptide, subsequence, portion, homologue, variant or derivative thereof, such as a T cell epitope, sufficient to modulate Th2 cell activity in the subject.

[0136] In all methods and uses of the invention, any appropriate protein, peptide, subsequence, portion, homologue, variant or derivative thereof can be used or administered. In particular non-limiting examples, the protein, peptide, subsequence, portion, homologue, variant or derivative thereof comprises, consists of or consists essentially of a TG amino acid sequence of a protein or peptide set forth in in Table 1 (SEQ ID NOS 1-620), Table 2 (SEQ ID NOS 621-1442), Table 4 (SEQ ID NOS 1443-2264) or Table 6, or a subsequence, portion, homologue, variant or derivative thereof.

[0137] In certain embodiments, two or more proteins, peptides, subsequences, portions, homologues, variants or derivatives thereof, may be administered to a subject. In particular embodiments, a protein, peptide, subsequence, portion, homologue, variant or derivative thereof consists of or consists essentially of an amino acid sequence of a TG protein or peptide set forth in Table 1 (SEQ ID NOS 1-620), Table 2 (SEQ ID NOS 621-1442), Table 4 (SEQ ID NOS 1443-2264) or Table 6, or subsequence, portion, homologue, variant or derivative thereof, and is administered with one or more other proteins, peptides, subsequences, portions, homologues, variants or derivatives thereof. Two or more proteins, peptides, subsequences, portions, homologues, variants or derivatives thereof may be administered as a combination composition, or administered separately, such as concurrently or in series or sequentially. Different proteins, peptides, subsequences, portions, homologues, variants or derivatives thereof, may be administered to a subject in the same amount, volume or concentration, or different amounts, volumes or concentrations. Thus, in certain embodiments, the subject may be administered the same amount of two or more different proteins, peptides, subsequences, portions, homologues, variants or derivatives thereof; and in other embodiments, the subject may be administered one protein, peptide, subsequence, portion, homologue, variant or derivative thereof in an amount, volume or concentration greater than one or more other protein, peptide, subsequence, portion, homologue, variant or derivative thereof administered to the subject.

[0138] Methods and uses of the invention include a favorable response or an improvement in one or more physiological conditions, disorders, illnesses, diseases, symptoms or complications caused by or associated with an antigen/allergen. In particular embodiments, a favorable response or improvement includes but is not limited to reduce, decrease, suppress, limit, control or inhibit an allergic response including reducing, decreasing, suppressing, limiting, controlling or inhibiting immune cell proliferation, function or activity, or eliciting, stimulating, inducing, promoting, increasing or enhancing immune cell proliferation or activity (e.g. regulatory T cells); or reduce, decrease, suppress, limit, control or inhibit the amount of allergen. In additional particular embodiments, an amount of a protein, peptide, subsequence, portion, homologue, variant or derivative thereof is sufficient to elicit, stimulate, induce, promote, increase or enhance or augment immunological tolerance to an allergen; or decrease, reduce, inhibit, suppress, prevent, control, or limit an allergic reaction or response. In further particular embodiments, an amount of a protein, peptide, subsequence, portion, homologue, variant or derivative thereof is sufficient to protect a subject from an allergic response or reduce, decrease, limit, control or inhibit susceptibility to an allergic response, allergic disorder or allergic disease, or one or more physiological conditions, disorders, illnesses, diseases, symptoms or complications caused by or associated with an allergen.

[0139] Methods and uses of the invention therefore include any therapeutic or beneficial effect. In various methods embodiments, an allergic response, allergic disorder or allergic disease, or one or more physiological conditions, disorders, illnesses, diseases, symptoms or complications caused by or associated with an allergen is reduced, decreased, inhibited, limited, delayed or prevented. Physiological conditions, disorders, illnesses and diseases associated with an antigen/allergen include but are not limited to asthma, allergic asthma, bronchiolitis and pleuritis, Allergic rhinitis; Onchocercal dermatitis; Atopic dermatitis; allergic conjunctivitis; Drug reactions; Nodules, eosinophilia, rheumatism, dermatitis, rashes, hives, and swelling (NERDS); esophageal and a gastrointestinal allergy, Airway Obstruction, Apnea, Asbestosis, Atelectasis, Berylliosis, Bronchiectasis, Bronchiolitis, Bronchiolitis Obliterans Organizing Pneumonia, Bronchitis, Bronchopulmonary Dysplasia, Empyema, Pleural Empyema, Pleural Epiglottitis, Hemoptysis, Hypertension, Kartagener Syndrome, Meconium Aspiration, Pleural Effusion, Pleurisy, Pneumonia, Pneumothorax, Respiratory Distress Syndrome, Respiratory Hypersensitivity, Rhinoscleroma, Scimitar Syndrome, Severe Acute Respiratory Syndrome, Silicosis, Tracheal Stenosis, eosinophilic pleural effusions, Histiocytosis; chronic eosinophilic pneumonia; hypersensitivity pneumonitis; Allergic bronchopulmonary aspergillosis; Sarcoidosis; Idiopathic pulmonary fibrosis; pulmonary edema; pulmonary embolism; pulmonary emphysema; Pulmonary Hyperventilation; Pulmonary Alveolar Proteinosis; Chronic Obstructive Pulmonary Disease (COPD); Interstitial Lung Disease; and Topical eosinophilia. Symptoms and complications associated with an allergen include but are not limited to cell infiltration, production of antibodies, production of cytokines, lymphokines, chemokines, interferons and interleukins, cell growth and maturation factors (e.g., differentiation factors), cell proliferation, cell differentiation, cell accumulation or migration and cell, tissue or organ damage or remodelling, allergic rhinitis; Onchocercal dermatitis; Atopic dermatitis; allergic conjunctivitis; Drug reactions; Nodules, eosinophilia, rheumatism, dermatitis, rashes, hives, and swelling (NERDS); esophageal and a gastrointestinal allergy. Additional symptoms of antigen/allergen exposure are known to one of skill in the art and treatment thereof in accordance with the invention is provided.

[0140] Methods and uses of the invention moreover include reducing, decreasing, inhibiting, delaying or preventing onset, progression, frequency, duration, severity, probability or susceptibility of one or more adverse symptoms, disorders, illnesses, diseases or complications caused by or associated with an antigen/allergen. In further various particular embodiments, methods and uses include improving, accelerating, facilitating, enhancing, augmenting, or hastening recovery of a subject from an allergic response, allergic disorder or allergic disease, or one or more physiological conditions, disorders, illnesses, diseases, symptoms or complications caused by or associated with an antigen/allergen. In yet additional various embodiments, methods and uses include stabilizing an allergic response, allergic disorder or allergic disease, or one or more physiological conditions, disorders, illnesses, diseases, symptoms or complications caused by or associated with an antigen/allergen.

[0141] A therapeutic or beneficial effect is therefore any objective or subjective measurable or detectable improvement or benefit provided to a particular subject. A therapeutic or beneficial effect can but need not be complete ablation of all or any allergic response, allergic disorder or allergic disease, or one or more physiological conditions, disorders, illnesses, diseases, symptoms or complications caused by or associated with an allergen. Thus, a satisfactory clinical endpoint is achieved when there is an incremental improvement or a partial reduction in an allergic response, allergic disorder or allergic disease, or one or more physiological conditions, disorders, illnesses, diseases, symptoms or complications caused by or associated with an allergen, or an inhibition, decrease, reduction, suppression, prevention, limit or control of worsening or progression of an allergic response, allergic disorder or allergic disease, or one or more physiological conditions, disorders, illnesses, diseases, symptoms or complications caused by or associated with an allergen, over a short or long duration (hours, days, weeks, months, etc.).

[0142] A therapeutic or beneficial effect also includes reducing or eliminating the need, dosage frequency or amount of a second therapeutic protocol or active such as another drug or other agent (e.g., anti-inflammatory) used for treating a subject having or at risk of having an allergic response, allergic disorder or allergic disease, or one or more physiological conditions, disorders, illnesses, diseases, symptoms or complications caused by or associated with an allergen. For example, reducing an amount of an adjunct therapy, such as a reduction or decrease of a treatment for an allergic response, allergic disorder or allergic disease, or one or more physiological conditions, disorders, illnesses, diseases, symptoms or complications caused by or associated with an allergen, or a specific immunotherapy, vaccination or immunization protocol is considered a beneficial effect. In addition, reducing or decreasing an amount of protein, peptide, subsequence, portion, homologue, variant or derivative thereof, used for specific immunotherapy, vaccination or immunization of a subject to provide protection to the subject is considered a beneficial effect.

[0143] As disclosed herein, invention proteins, peptides, subsequences, etc., can be used in methods of providing specific immunotherapy to a subject, such as a subject with or at risk of an allergic response, allergic disorder or allergic disease, or one or more physiological conditions, disorders, illnesses, diseases, symptoms or complications caused by or associated with an allergen. In one embodiment, a method or use includes administering to a subject an amount of a protein, peptide, subsequence, portion, homologue, variant or derivative thereof sufficient to elicit, stimulate, induce, promote, increase, enhance or augment immunological tolerance in the subject to an antigen/allergen. In another embodiment, a method includes administering to a subject an amount of a nucleic acid encoding all or a portion (e.g., a T cell epitope) of a protein, peptide, subsequence, portion, homologue, variant or derivative thereof sufficient to elicit, stimulate, induce, promote, increase, enhance or augment immunological tolerance of the subject to an allergen.

[0144] When an antigen(s) or allergen(s) is administered to induce tolerance, an amount or dose of the antigen or allergen to be administered, and the period of time required to achieve a desired outcome or result (e.g., to desensitize or develop tolerance to the antigen or allergen) can be determined by one skilled in the art. The antigen or allergen may be administered to the patient through any route known in the art, including, but not limited to oral, inhalation, sublingual, epicutaneous, intranasal, and/or parenteral routes (intravenous, intramuscular, subcutaneously, and intraperitoneal).

[0145] Methods and uses of the invention include administration of a protein, peptide, subsequence, portion, homologue, variant or derivative thereof to a subject prior to contact by or exposure to an allergen; administration prior to, substantially contemporaneously with or after a subject has been contacted by or exposed to an allergen; and administration prior to, substantially contemporaneously with or after an allergic response, allergic disorder or allergic disease, or one or more physiological conditions, disorders, illnesses, diseases, symptoms or complications caused by or associated with an allergen. A subject contacted by or exposed to an allergen may have contact or exposure over a period of 1-5, 5-10, 10-20, 20-30, 30-50, 50-100 hours, days, months, or years.

[0146] Invention compositions (e.g., proteins, peptides, subsequences, portions, homologues, variants or derivatives thereof, including T cell epitopes, for example, of an amino acid sequence of a TG protein or peptide set forth in Table 1 (SEQ ID NOS 1-620), Table 2 (SEQ ID NOS 621-1442), Table 4 (SEQ ID NOS 1443-2264) or Table 6), methods and uses can be combined with any compound, agent, drug, treatment or other therapeutic regimen or protocol having a desired therapeutic, beneficial, additive, synergistic or complementary activity or effect. Exemplary combination compositions and treatments include multiple proteins, peptides, subsequences, portions, homologues, variants or derivatives thereof such as T cell epitopes as described herein (e.g., of an amino acid sequence of a TG protein or peptide set forth in Table 1 (SEQ ID NOS 1-620), Table 2 (SEQ ID NOS 621-1442), Table 4 (SEQ ID NOS 1443-2264) or Table 6), and second actives, such as anti-allergen compounds, agents, drugs, treatments and therapies, including but not limited to anti-histamines, anti-inflammatories, decongestants and corticosteroids as well as agents that assist, promote, stimulate or enhance efficacy. Such anti-allergen drugs, agents, treatments and therapies can be administered or performed prior to, substantially contemporaneously with or following any method or use described herein, for example, a therapeutic use or method of treating a subject for an allergic response, allergic disorder or allergic disease, or one or more physiological conditions, disorders, illnesses, diseases, symptoms or complications caused by or associated with an allergen, or a method or use of providing specific immunotherapy to a subject.

[0147] Accordingly, methods and uses include combinations of TG proteins, peptides, subsequences, portions, homologues, variants or derivatives thereof and second actives, and administering as a combination with a second active, or administered separately, such as concurrently or in series or sequentially (prior to or following) to administering a second active to a subject. The invention therefore provides combinations of one or more proteins, peptides, subsequences, portions, homologues, variants or derivatives thereof, in combination with a second active, including but not limited to any compound, agent, drug, therapeutic regimen, treatment protocol, process, remedy or composition, such as anti-histamine, anti-inflammatory, decongestant and corticosteroid, or immune tolerance stimulating, enhancing or augmenting protocol, or specific immunotherapy protocol set forth herein or known in the art. The compound, agent, drug, therapeutic regimen, treatment protocol, process, remedy or composition can be administered or performed prior to, substantially contemporaneously with or following administration of one or more proteins, peptides, subsequences, portions, homologues, variants or derivatives thereof, or a nucleic acid encoding all or a portion (e.g., a T cell epitope) of a protein, peptide, subsequence, portion, homologue, variant or derivative thereof, to a subject. Specific non-limiting examples of combination embodiments therefore include the foregoing or other compound, agent, drug, therapeutic regimen, treatment protocol, process, remedy or composition.

[0148] An exemplary combination is a TG protein, peptide, subsequence, portion, homologue, variant or derivative thereof, and a different protein, peptide, or subsequence, portion, homologue, variant or derivative thereof, of an amino acid sequence of a TG protein or peptide set forth in Table 1 (SEQ ID NOS 1-620), Table 2 (SEQ ID NOS 621-1442), Table 4 (SEQ ID NOS 1443-2264) or Table 6. Another exemplary combination is a protein, peptide, subsequence, portion, homologue, variant or derivative thereof, and an immunological tolerance inducing molecule.

[0149] In invention methods and uses in which there is a desired outcome or effect, such as a therapeutic or prophylactic method or use that provides a benefit from treatment, protection, inducing immunological tolerance, vaccination or specific immunotherapy, a TG protein, peptide, subsequence, portion, homologue, variant or derivative thereof can be administered in a sufficient or effective amount. As used herein, a “sufficient amount” or “effective amount” or an “amount sufficient” or an “amount effective” refers to an amount that provides, in single (e.g., primary) or multiple (e.g., booster) doses, alone or in combination with one or more other compounds, treatments, therapeutic regimens or agents (e.g., a drug), a long term or a short term detectable or measurable improvement in a given subject or any objective or subjective benefit to a given subject of any degree or for any time period or duration (e.g., for minutes, hours, days, months, years, or cured).

[0150] An amount sufficient or an amount effective can but need not be provided in a single administration and can but need not be achieved by a particular protein, peptide, subsequence, portion, homologue, variant or derivative thereof, alone, optionally in a combination composition or method or use that includes a second active. In addition, an amount sufficient or an amount effective need not be sufficient or effective if given in single or multiple doses without a second or additional administration or dosage, since additional doses, amounts or duration above and beyond such doses, or additional antigens, compounds, drugs, agents, treatment or therapeutic regimens may be included in order to provide a given subject with a detectable or measurable improvement or benefit to the subject. For example, to increase, enhance, improve or optimize specific immunotherapy, after an initial or primary administration of one or more proteins, peptides, subsequences, portions, homologues, variants or derivative thereof, the subject can be administered one or more additional “boosters” of one or more proteins, peptides, subsequences, portions, homologues, variants or derivatives thereof. Such subsequent “booster” administrations can be of the same or a different type, formulation, dose, concentration, route, etc.

[0151] An amount sufficient or an amount effective need not be therapeutically or prophylactically effective in each and every subject treated, nor a majority of subjects treated in a given group or population. An amount sufficient or an amount effective means sufficiency or effectiveness in a particular subject, not a group of subjects or the general population. As is typical for such methods, different subjects will exhibit varied responses to a method of the invention, such as immunization, vaccination, specific immunotherapy and therapeutic treatments.

[0152] The term “subject” includes but is not limited to a subject at risk of allergen contact or exposure as well as a subject that has been contacted by or exposed to an allergen. A subject also includes those having or at risk of having or developing an immune response to an antigen or an allergen. Such subjects include mammalian animals (mammals), such as a non-human primate (apes, gibbons, gorillas, chimpanzees, orangutans, macaques), a domestic animal (dogs and cats), a farm animal (poultry such as chickens and ducks, horses, cows, goats, sheep, pigs), experimental animal (mouse, rat, rabbit, guinea pig) and humans. Subjects include animal disease models, for example, mouse and other animal models of allergic response known in the art.

[0153] Accordingly, subjects appropriate for treatment include those having or at risk of exposure to an antigen or allergen, also referred to as subjects in need of treatment. Subjects in need of treatment therefore include subjects that have been exposed to or contacted with an antigen or allergen, or that have an ongoing contact or exposure or have developed one or more adverse symptoms caused by or associated with an antigen or allergen, regardless of the type, timing or degree of onset, progression, severity, frequency, duration of the symptoms.

[0154] Target subjects and subjects in need of treatment also include those at risk of allergen exposure or contact or at risk of having exposure or contact to an allergen. Accordingly, subjects include those at increased or elevated (high) risk of an allergic reaction; has, or has previously had or is at risk of developing hypersensitivity to an allergen; and those that have or have previously had or is at risk of developing asthma.

[0155] More particular target subjects include subjects allergic to particular Timothy Grass antigens and/or allergens. In particular embodiments, a subject is allergic to a Timothy grass pollen allergen, such as a Phl p 1, Phl p 5, and/or Phl p 6 allergen, or is allergic to a homologous allergen, such as a Group 1, Group 5 and/or Group 6 Grass Pollen allergen, e.g. Grass Pollen from Grass of the order Poales.

[0156] Invention compositions, methods and uses are therefore applicable to treating a subject who is at risk of allergen exposure or contact but has not yet been exposed to or contacted with the allergen. Prophylactic uses and methods are therefore included. Target subjects for prophylaxis may be at increased risk (probability or susceptibility) of allergen exposure or contact as set forth herein. Such subjects are considered in need of treatment due to being at risk.

[0157] Subjects for prophylaxis need not be at increased risk but may be from the general population in which it is desired to protect a subject against an allergic response, allergic disorder or allergic disease, or one or more physiological conditions, disorders, illnesses, diseases, symptoms or complications caused by or associated with an allergen or to provide specific immunotherapy, for example. Such a subject that is desired to be protected against an allergic response, allergic disorder or allergic disease, or one or more physiological conditions, disorders, illnesses, diseases, symptoms or complications caused by or associated with an allergen or to be provided specific immunotherapy can be administered a protein, peptide, subsequence, portion, homologue, variant or derivative thereof. In another non-limiting example, a subject that is not specifically at risk of exposure to or contact by an allergen, but nevertheless desires protection against an allergic response, allergic disorder or allergic disease, or one or more physiological conditions, disorders, illnesses, diseases, symptoms or complications caused by or associated with an allergen, can be administered a protein, peptide, subsequence, portion, homologue, variant or derivative thereof. Such subjects are also considered in need of treatment.

[0158] “Prophylaxis” and grammatical variations thereof mean a method or use in which contact, administration or in vivo delivery to a subject is prior to contact with or exposure to an allergen. In certain situations it may not be known that a subject has been contacted with or exposed to an allergen, but administration or in vivo delivery to a subject can be performed prior to manifestation of an allergic response, allergic disorder or allergic disease, or one or more physiological conditions, disorders, illnesses, diseases, symptoms or complications caused by or associated with an allergen. For example, a subject can be provided protection against an allergic response, allergic disorder or allergic disease, or one or more physiological conditions, disorders, illnesses, diseases, symptoms or complications caused by or associated with an allergen or provided specific immunotherapy with a protein, peptide, subsequence, portion, homologue, variant or derivative thereof. In such case, a method or use can eliminate, prevent, inhibit, suppress, limit, decrease or reduce the probability of or susceptibility towards an allergic response, allergic disorder or allergic disease, or one or more physiological conditions, disorders, illnesses, diseases, symptoms or complications caused by or associated with an antigen/allergen.

[0159] “Prophylaxis” can also refer to a method or use in which contact, administration or in vivo delivery to a subject is prior to a secondary or subsequent exposure to an antigen/allergen. In such a situation, a subject may have had a prior contact or exposure to an allergen. In such subjects, an acute allergic reaction may but need not be resolved. Such a subject typically may have developed anti-allergen antibodies due to the prior exposure. Immunization or vaccination, by administration or in vivo delivery to such a subject, can be performed prior to a secondary or subsequent allergen exposure. Such a method or use can eliminate, prevent, inhibit, suppress, limit, decrease or reduce the probability of or susceptibility towards a secondary or subsequent allergic response, allergic disorder or allergic disease, or one or more physiological conditions, disorders, illnesses, diseases, symptoms or complications caused by or associated with an allergen. In certain embodiments, such a method or use includes providing specific immunotherapy to the subject to eliminate, prevent, inhibit, suppress, limit, decrease or reduce the probability of or susceptibility towards a secondary or subsequent allergic response, allergic disorder or allergic disease, or one or more physiological conditions, disorders, illnesses, diseases, symptoms or complications caused by or associated with an antigen/allergen.

[0160] Treatment of an allergic reaction or response can be at any time during the reaction or response. A protein, peptide, subsequence, portion, homologue, variant or derivative thereof, can be administered as a combination (e.g., with a second active), or separately concurrently or in sequence (sequentially) in accordance with the methods and uses described herein as a single or multiple dose e.g., one or more times hourly, daily, weekly, monthly or annually or between about 1 to 10 weeks, or for as long as appropriate, for example, to achieve a reduction in the onset, progression, severity, frequency, duration of one or more symptoms or complications associated with or caused by an allergic response, allergic disorder or allergic disease, or one or more physiological conditions, disorders, illnesses, diseases, symptoms or complications caused by or associated with an antigen/allergen.

[0161] Accordingly, methods and uses of the invention can be practiced one or more times (e.g., 1-10, 1-5 or 1-3 times) an hour, day, week, month, or year. The skilled artisan will know when it is appropriate to delay or discontinue administration. A non-limiting dosage schedule is 1-7 times per week, for 1, 2, 3, 4, 5, 6, 7, 8, 9, 10, 15, 20 or more weeks.

[0162] Doses can be based upon current existing protocols, empirically determined, using animal disease models or optionally in human clinical trials. Initial study doses can be based upon animal studies, e.g. a mouse, and the amount of protein, peptide, subsequence, portion, homologue, variant or derivative thereof, administered that is determined to be effective. Exemplary non-limiting amounts (doses) are in a range of about 0.1 mg/kg to about 100 mg/kg, and any numerical value or range or value within such ranges. Greater or lesser amounts (doses) can be administered, for example, 0.01-500 mg/kg, and any numerical value or range or value within such ranges. The dose can be adjusted according to the mass of a subject, and will generally be in a range from about 1-10 ug/kg, 10-25 ug/kg, 25-50 ug/kg, 50-100 ug/kg, 100-500 ug/kg, 500-1,000 ug/kg, 1-5 mg/kg, 5-10 mg/kg, 10-20 mg/kg, 20-50 mg/kg, 50-100 mg/kg, 100-250 mg/kg, 250-500 mg/kg, or more, two, three, four, or more times per hour, day, week, month or annually. A typical range will be from about 0.3 mg/kg to about 50 mg/kg, 0-25 mg/kg, or 1.0-10 mg/kg, or any numerical value or range or value within such ranges.

[0163] Doses can vary and depend upon whether the treatment is prophylactic or therapeutic, whether a subject has been previously exposed to the antigen/allergen, the onset, progression, severity, frequency, duration, probability of or susceptibility of the symptom, condition, pathology or complication, or vaccination or specific immunotherapy to which treatment is directed, the clinical endpoint desired, previous or simultaneous treatments, the general health, age, gender, race or immunological competency of the subject and other factors that will be appreciated by the skilled artisan. The skilled artisan will appreciate the factors that may influence the dosage and timing required to provide an amount sufficient for providing a therapeutic or prophylactic benefit.

[0164] Typically, for treatment, a protein, peptide, subsequence, portion, homologue, variant or derivative thereof, will be administered as soon as practical, typically within 1-2, 2-4, 4-12, 12-24 or 24-72 hours after a subject is exposed to or contacted with an allergen, or within 1-2, 2-4, 4-12, 12-24 or 24-48 hours after onset or development of one or more of an allergic response, allergic disorder or allergic disease, or one or more physiological conditions, disorders, illnesses, diseases, symptoms or complications caused by or associated with an antigen/allergen.

[0165] For prophylactic treatment in connection with vaccination or specific immunotherapy, proteins, peptides, subsequences, portions, homologues, variants or derivatives thereof, can be administered for a duration of 0-4 weeks, e.g., 2-3 weeks, prior to exposure to or contact by an allergen or at least within 1-2, 2-4, 4-12, 12-24, 24-48 or 48-72 hours prior to exposure to or contact by an allergen. For an acute allergic reaction, proteins, peptides, subsequences, portions, homologues, variants or derivatives thereof may be administered at any appropriate time.

[0166] The dose amount, number, frequency or duration may be proportionally increased or reduced, as indicated by the status of the subject. For example, whether the subject has an allergic response, whether the subject has been exposed to or contacted by an allergen or is merely at risk of allergen contact or exposure, whether the subject is a candidate for or will be vaccinated or provided specific immunotherapy. The dose amount, number, frequency or duration may be proportionally increased or reduced, as indicated by any adverse side effects, complications or other risk factors of the treatment or therapy.

[0167] In methods and uses of the invention, the route, dose, number and frequency of administrations, treatments, vaccinations and specific immunotherapy, and timing/intervals between treatment, vaccination and specific immunotherapy, and allergen exposure can be modified. Although rapid induction of immune responses or immunological tolerance is desired for developing protective emergency vaccines against an allergic response, allergic disorder or allergic disease, or one or more physiological conditions, disorders, illnesses, diseases, symptoms or complications caused by or associated with an allergen, in certain embodiments, a desirable treatment will elicit robust, long-lasting protection against an allergic response, allergic disorder or allergic disease, or one or more physiological conditions, disorders, illnesses, diseases, symptoms or complications caused by or associated with an allergen. Thus, in certain embodiments, invention compositions, methods and uses provide long-lasting protection against an allergic response, allergic disorder or allergic disease, or one or more physiological conditions, disorders, illnesses, diseases, symptoms or complications caused by or associated with an allergen. Specific immunotherapy strategies can provide long-lived protection against an allergic response, allergic disorder or allergic disease, or one or more physiological conditions, disorders, illnesses, diseases, symptoms or complications caused by or associated with an allergen depending on the level of induced immunological tolerance or a T cell response or activity.

[0168] TG proteins or peptides, or subsequences, portions, homologues, variants or derivatives thereof can be provided in compositions, and in turn such compositions can be used in accordance with the invention methods and uses. Such compositions, methods and uses include pharmaceutical compositions and formulations. In certain embodiments, a pharmaceutical composition includes one or more TG proteins, peptides, subsequences, portions, homologues, variants or derivatives thereof described herein (e.g., an amino acid sequence of a TG protein or peptide set forth in Table 1 (SEQ ID NOS 1-620), Table 2 (SEQ ID NOS 621-1442), Table 4 (SEQ ID NOS 1443-2264) or Table 6). In particular, aspects, such compositions and formulations may be a vaccine, including but not limited to a vaccine to protect against an allergic response, allergic disorder or allergic disease, or one or more physiological conditions, disorders, illnesses, diseases, symptoms or complications caused by or associated with an allergen.

[0169] As used herein the term “pharmaceutically acceptable” and “physiologically acceptable” mean a biologically acceptable formulation, gaseous, liquid or solid, or mixture thereof, which is suitable for one or more routes of administration, in vivo delivery or contact. Such formulations include solvents (aqueous or non-aqueous), solutions (aqueous or non-aqueous), emulsions (e.g., oil-in-water or water-in-oil), suspensions, syrups, elixirs, dispersion and suspension media, coatings, isotonic and absorption promoting or delaying agents, compatible with pharmaceutical administration or in vivo contact or delivery. Aqueous and non-aqueous solvents, solutions and suspensions may include suspending agents and thickening agents. Such pharmaceutically acceptable carriers include tablets (coated or uncoated), capsules (hard or soft), microbeads, powder, granules and crystals. Supplementary active compounds (e.g., preservatives, antibacterial, antiviral and antifungal agents) can also be incorporated into the compositions.

[0170] To increase an immune response, immunological tolerance or protection against an allergic response, allergic disorder or allergic disease, or one or more physiological conditions, disorders, illnesses, diseases, symptoms or complications caused by or associated with an allergen, proteins, peptides, subsequences, portions, homologues, variants or derivatives thereof, can be coupled to another protein such as ovalbumin or keyhole limpet hemocyanin (KLH), thyroglobulin or a toxin such as tetanus or cholera toxin. Proteins, peptides, subsequences, portions, homologues, variants or derivatives thereof can also be mixed with adjuvants.

[0171] Adjuvants include, for example: oil (mineral or organic) emulsion adjuvants such as Freund's complete (CFA) and incomplete adjuvant (IFA) (WO 95/17210; WO 98/56414; WO 99/12565; WO 99/11241; and U.S. Pat. No. 5,422,109); metal and metallic salts, such as aluminum and aluminum salts, such as aluminum phosphate or aluminum hydroxide, alum (hydrated potassium aluminum sulfate); bacterially derived compounds, such as Monophosphoryl lipid A and derivatives thereof (e.g., 3 De-O-acylated monophosphoryl lipid A, aka 3D-MPL or d3-MPL, to indicate that position 3 of the reducing end glucosamine is de-O-acylated, 3D-MPL consisting of the tri and tetra acyl congeners), and enterobacterial lipopolysaccharides (LPS); plant derived saponins and derivatives thereof, for example Quil A (isolated from the Quilaja Saponaria Molina tree, see, e.g., “Saponin adjuvants”, Archiv. für die gesamte Virusforschung, Vol. 44, Springer Verlag, Berlin, p 243-254; U.S. Pat. No. 5,057,540), and fragments of Quil A which retain adjuvant activity without associated toxicity, for example QS7 and QS21 (also known as QA7 and QA21), as described in WO96/33739, for example; surfactants such as, soya lecithin and oleic acid; sorbitan esters such as sorbitan trioleate; and polyvinylpyrrolidone; oligonucleotides such as CpG (WO 96/02555, and WO 98/16247), polyriboA and polyriboU; block copolymers; and immunostimulatory cytokines such as GM-CSF and IL-1, and Muramyl tripeptide (MTP). Additional examples of adjuvants are described, for example, in “Vaccine Design—the subunit and adjuvant approach” (Edited by Powell, M. F. and Newman, M. J.; 1995, Pharmaceutical Biotechnology (Plenum Press, New York and London, ISBN 0-306-44867-X) entitled “Compendium of vaccine adjuvants and excipients” by Powell, M. F. and Newman M.

[0172] Cosolvents may be added to a protein, peptide, subsequence, portion, homologue, variant or derivative thereof, composition or formulation. Non-limiting examples of cosolvents contain hydroxyl groups or other polar groups, for example, alcohols, such as isopropyl alcohol; glycols, such as propylene glycol, polyethyleneglycol, polypropylene glycol, glycol ether; glycerol; polyoxyethylene alcohols and polyoxyethylene fatty acid esters. Non-limiting examples of cosolvents contain hydroxyl groups or other polar groups, for example, alcohols, such as isopropyl alcohol; glycols, such as propylene glycol, polyethyleneglycol, polypropylene glycol, glycol ether; glycerol; polyoxyethylene alcohols and polyoxyethylene fatty acid esters.

[0173] Supplementary compounds (e.g., preservatives, antioxidants, antimicrobial agents including biocides and biostats such as antibacterial, antiviral and antifungal agents) can also be incorporated into the compositions. Pharmaceutical compositions may therefore include preservatives, anti-oxidants and antimicrobial agents.

[0174] Preservatives can be used to inhibit microbial growth or increase stability of ingredients thereby prolonging the shelf life of the pharmaceutical formulation. Suitable preservatives are known in the art and include, for example, EDTA, EGTA, benzalkonium chloride or benzoic acid or benzoates, such as sodium benzoate. Antioxidants include, for example, ascorbic acid, vitamin A, vitamin E, tocopherols, and similar vitamins or provitamins.

[0175] An antimicrobial agent or compound directly or indirectly inhibits, reduces, delays, halts, eliminates, arrests, suppresses or prevents contamination by or growth, infectivity, replication, proliferation, reproduction, of a pathogenic or non-pathogenic microbial organism. Classes of antimicrobials include antibacterial, antiviral, antifungal and antiparasitics. Antimicrobials include agents and compounds that kill or destroy (-cidal) or inhibit (-static) contamination by or growth, infectivity, replication, proliferation, reproduction of the microbial organism.

[0176] Exemplary antibacterials (antibiotics) include penicillins (e.g., penicillin G, ampicillin, methicillin, oxacillin, and amoxicillin), cephalosporins (e.g., cefadroxil, ceforanid, cefotaxime, and ceftriaxone), tetracyclines (e.g., doxycycline, chlortetracycline, minocycline, and tetracycline), aminoglycosides (e.g., amikacin, gentamycin, kanamycin, neomycin, streptomycin, netilmicin, paromomycin and tobramycin), macrolides (e.g., azithromycin, clarithromycin, and erythromycin), fluoroquinolones (e.g., ciprofloxacin, lomefloxacin, and norfloxacin), and other antibiotics including chloramphenicol, clindamycin, cycloserine, isoniazid, rifampin, vancomycin, aztreonam, clavulanic acid, imipenem, polymyxin, bacitracin, amphotericin and nystatin.

[0177] Particular non-limiting classes of anti-virals include reverse transcriptase inhibitors; protease inhibitors; thymidine kinase inhibitors; sugar or glycoprotein synthesis inhibitors; structural protein synthesis inhibitors; nucleoside analogues; and viral maturation inhibitors. Specific non-limiting examples of anti-virals include nevirapine, delavirdine, efavirenz, saquinavir, ritonavir, indinavir, nelfinavir, amprenavir, zidovudine (AZT), stavudine (d4T), larnivudine (3TC), didanosine (DDI), zalcitabine (ddC), abacavir, acyclovir, penciclovir, ribavirin, valacyclovir, ganciclovir, 1,-D-ribofuranosyl-1,2,4-triazole-3 carboxamide, 9->2-hydroxy-ethoxy methylguanine, adamantanamine, 5-iodo-2′-deoxyuridine, trifluorothymidine, interferon and adenine arabinoside.

[0178] Pharmaceutical formulations and delivery systems appropriate for the compositions, methods and uses of the invention are known in the art (see, e.g., Remington: The Science and Practice of Pharmacy (2003) 20^{th} ed., Mack Publishing Co., Easton, Pa.; Remington's Pharmaceutical Sciences (1990) 18^{th} ed., Mack Publishing Co., Easton, Pa.; The Merck Index (1996) 12^{th} ed., Merck Publishing Group, Whitehouse, N.J.; Pharmaceutical Principles of Solid Dosage Forms (1993), Technonic Publishing Co., Inc., Lancaster, Pa.; Ansel ad Soklosa, Pharmaceutical Calculations (2001) 11^{th} ed., Lippincott Williams & Wilkins, Baltimore, Md.; and Poznansky et al., Drug Delivery Systems (1980), R. L. Juliano, ed., Oxford, N.Y., pp. 253-315).

[0179] Pharmaceutical compositions can be formulated to be compatible with a particular route of administration. Thus, pharmaceutical compositions include carriers, diluents, or excipients suitable for administration by various routes. Exemplary routes of administration for contact or in vivo delivery which a composition can optionally be formulated include inhalation, respiration, intranasal, intubation, intrapulmonary instillation, oral, buccal, intrapulmonary, intradermal, topical, dermal, parenteral, sublingual, subcutaneous, intravascular, intrathecal, intraarticular, intracavity, transdermal, iontophoretic, intraocular, opthalmic, optical, intravenous (i.v.), intramuscular, intraglandular, intraorgan, or intralymphatic.

[0180] Formulations suitable for parenteral administration include aqueous and non-aqueous solutions, suspensions or emulsions of the active compound, which preparations are typically sterile and can be isotonic with the blood of the intended recipient. Non-limiting illustrative examples include water, saline, dextrose, fructose, ethanol, animal, vegetable or synthetic oils.

[0181] Methods and uses of the invention may be practiced by any mode of administration or delivery, or by any route, systemic, regional and local administration or delivery. Exemplary administration and delivery routes include intravenous (i.v.), intraperitoneal (i.p.), intrarterial, intramuscular, parenteral, subcutaneous, intra-pleural, topical, dermal, intradermal, transdermal, transmucosal, intra-cranial, intra-spinal, rectal, oral (alimentary), mucosal, inhalation, respiration, intranasal, intubation, intrapulmonary, intrapulmonary instillation, buccal, sublingual, intravascular, intrathecal, intracavity, iontophoretic, intraocular, ophthalmic, optical, intraglandular, intraorgan, or intralymphatic.

[0182] For oral administration, a composition can take the form of, for example, tablets or capsules prepared by conventional means with pharmaceutically acceptable excipients such as binding agents (for example, pregelatinised maize starch, polyvinylpyrrolidone or hydroxypropyl methylcellulose); fillers (for example, lactose, microcrystalline cellulose or calcium hydrogen phosphate); lubricants (for example, magnesium stearate, talc or silica); disintegrants (for example, potato starch or sodium starch glycolate); or wetting agents (for example, sodium lauryl sulphate). The tablets can be coated by methods known in the art. Liquid preparations for oral administration can take the form of, for example, solutions, syrups or suspensions, or they can be presented as a dry product for constitution with water or other suitable vehicle before use. Such liquid preparations can be prepared by conventional means with pharmaceutically acceptable additives such as suspending agents (for example, sorbitol syrup, cellulose derivatives or hydrogenated edible fats); emulsifying agents (for example, lecithin or acacia); non-aqueous vehicles (for example, almond oil, oily esters, ethyl alcohol or fractionated vegetable oils); and preservatives (for example, methyl or propyl-p-hydroxybenzoates or sorbic acid). The preparations can also contain buffer salts, flavoring, coloring, and sweetening agents as appropriate.

[0183] For administration by inhalation, a composition can be delivered in the form of an aerosol spray presentation from pressurized packs or a nebulizer, with the use of a suitable propellant, for example, dichlorodifluoromethane, trichlorofluoromethane, dichlorotetrafluoroethane, carbon dioxide or other suitable gas. In the case of a pressurized aerosol, the dosage unit can be determined by providing a valve to deliver a metered amount. Capsules and cartridges for use in an inhaler or insufflator can be formulated containing a powder mix of the compound and a suitable powder base such as lactose or starch.

[0184] Invention TG proteins and peptides, e.g., a protein or peptide set forth in Table 1 (SEQ ID NOS 1-620), Table 2 (SEQ ID NOS 621-1442), Table 4 (SEQ ID NOS 1443-2264) or Table 6), subsequences, portions, homologues, variants or derivatives thereof optionally along with any adjunct agent, compound, drug, composition, whether active or inactive, etc., can be packaged in unit dosage form (capsules, tablets, troches, cachets, lozenges) for ease of administration and uniformity of dosage. A “unit dosage form” as used herein refers to physically discrete units suited as unitary dosages for the subject to be treated; each unit containing a predetermined quantity of active ingredient optionally in association with a pharmaceutical carrier (excipient, diluent, vehicle or filling agent) which, when administered in one or more doses, is calculated to produce a desired effect (e.g., prophylactic or therapeutic effect). Unit dosage forms also include, for example, ampules and vials, which may include a composition in a freeze-dried or lyophilized state; a sterile liquid carrier, for example, can be added prior to administration or delivery in vivo. Unit dosage forms additionally include, for example, ampules and vials with liquid compositions disposed therein. Individual unit dosage forms can be included in multi-dose kits or containers. Pharmaceutical formulations can be packaged in single or multiple unit dosage form for ease of administration and uniformity of dosage.

[0185] The invention also provides methods of diagnosing and detecting an allergic response or allergy in a subject. The methods can be performed in solution, in solid phase, in silica, in vitro, in a cell, and in vivo. In one embodiment, a method includes contacting a cell (e.g., T cell) from the subject with a TG protein, peptide, subsequence, portion, homologue, variant or derivative thereof, as described herein (e.g., of an amino acid sequence of a TG protein or peptide set forth in Table 1 (SEQ ID NOS 1-620), Table 2 (SEQ ID NOS 621-1442), Table 4 (SEQ ID NOS 1443-2264) or Table 6); and determining if the protein or peptide modulates an immune response or activity of the contacted cell (e.g., T cell). A determination that the TG protein or peptide modulates an immune response or immune activity of the contacted cell indicates that the subject has an allergic response or an allergy, in particular, an allergy to the protein, peptide, subsequence, portion, homologue, variant or derivative thereof (e.g., of an amino acid sequence of a TG protein or peptide set forth in Table 1 (SEQ ID NOS 1-620), Table 2 (SEQ ID NOS 621-1442), Table 4 (SEQ ID NOS 1443-2264) or Table 6). In a particular aspect, the immune activity determined is Th2 cell reactivity. In another particular aspect, immune response or activity is determined by assaying for a cutaneous immunological hypersensitive reaction.

[0186] The terms “determining,” “assaying” and “measuring” and grammatical variations thereof are used interchangeably herein and refer to either qualitative or quantitative determinations, or both qualitative and quantitative determinations, that involve manipulation or processing. When the terms are used in reference to measurement or detection, any means of assessing the relative amount, including the various methods set forth herein and known in the art, performed by the hand of man, is contemplated.

[0187] The invention provides kits including TG protein, peptide, subsequence, portion, homologue, variant or derivative thereof (e.g., of an amino acid sequence of a TG protein or peptide set forth in Table 1 (SEQ ID NOS 1-620), Table 2 (SEQ ID NOS 621-1442), Table 4 (SEQ ID NOS 1443-2264) or Table 6), combination compositions and pharmaceutical formulations thereof, packaged into suitable packaging material. Kits can be used in various in vitro, ex vivo and in vivo methods and uses, for example a treatment method or use as disclosed herein.

[0188] A kit typically includes a label or packaging insert including a description of the components or instructions for use in vitro, in vivo, or ex vivo, of the components therein. A kit can contain a collection of such components, e.g., a TG protein, peptide, subsequence, portion, homologue, variant or derivative thereof (e.g., of an amino acid sequence of a TG protein or peptide set forth in Table 1 (SEQ ID NOS 1-620), Table 2 (SEQ ID NOS 621-1442), Table 4 (SEQ ID NOS 1443-2264) or Table 6), alone, or in combination with another therapeutically useful composition (e.g., an immune modulatory drug).

[0189] The term “packaging material” refers to a physical structure housing the components of the kit. The packaging material can maintain the components sterilely, and can be made of material commonly used for such purposes (e.g., paper, corrugated fiber, glass, plastic, foil, ampules, vials, tubes, etc.).

[0190] Kits of the invention can include labels or inserts. Labels or inserts include “printed matter,” e.g., paper or cardboard, or separate or affixed to a component, a kit or packing material (e.g., a box), or attached to an ampule, tube or vial containing a kit component. Labels or inserts can additionally include a computer readable medium, such as a disk (e.g., hard disk), optical disk such as CD- or DVD-ROM/RAM, DVD, MP3, magnetic tape, or an electrical storage media such as RAM and ROM or hybrids of these such as magnetic/optical storage media, FLASH media or memory type cards.

[0191] Labels or inserts can include identifying information of one or more components therein, dose amounts, clinical pharmacology of the active ingredient(s) including mechanism of action, pharmacokinetics and pharmacodynamics. Labels or inserts can include information identifying manufacturer information, lot numbers, manufacturer location and date.

[0192] Labels or inserts can include information on a condition, disorder, disease or symptom for which a kit component may be used. Labels or inserts can include instructions for the clinician or for a subject for using one or more of the kit components in a method, use, treatment protocol or therapeutic regimen. Instructions can include dosage amounts, frequency or duration, and instructions for practicing any of the methods and uses, treatment protocols or therapeutic regimes set forth herein. Exemplary instructions include, instructions for modulating an immune response or activity of a cell against an allergen; modulating an immune response against an allergen in a subject; desensitizing, or inducing, eliciting, increasing or improving immunological tolerance to a protein or peptide allergen; reducing risk or providing a subject protection against an allergic reaction, allergic response, allergic disorder or allergic disease; treating an allergic reaction, allergic response, allergic disorder or allergic disease; or detecting an allergic response or diagnosing an allergy in a subject.

[0193] Labels or inserts can include information on any benefit that a component may provide, such as a prophylactic or therapeutic benefit. Labels or inserts can include information on potential adverse side effects, such as warnings to the subject or clinician regarding situations where it would not be appropriate to use a particular composition. Adverse side effects could also occur when the subject has, will be or is currently taking one or more other medications that may be incompatible with the composition, or the subject has, will be or is currently undergoing another treatment protocol or therapeutic regimen which would be incompatible with the composition and, therefore, instructions could include information regarding such incompatibilities.

[0194] Invention kits can additionally include other components. Each component of the kit can be enclosed within an individual container and all of the various containers can be within a single package. Invention kits can be designed for cold storage. Invention kits can further be designed to contain to the protein, peptide, subsequence, portion, homologue, variant or derivative thereof (e.g., of an amino acid sequence of a TG protein or peptide set forth in Table 1 (SEQ ID NOS 1-620), Table 2 (SEQ ID NOS 621-1442), Table 4 (SEQ ID NOS 1443-2264) or Table 6), or combination compositions or pharmaceutical compositions.

[0195] Unless otherwise defined, all technical and scientific terms used herein have the same meaning as commonly understood by one of ordinary skill in the art to which this invention belongs. Although methods and materials similar or equivalent to those described herein can be used in the practice or testing of the present invention, suitable methods and materials are described herein.

[0196] All publications and patent applications cited in this specification are herein incorporated by reference as if each individual publication or patent application were specifically and individually indicated to be incorporated by reference. The citation of any publication is for its disclosure prior to the filing date and should not be construed as an admission that the invention is not entitled to antedate such publication by virtue of prior invention.

[0197] As used in this specification and the appended claims, the use of an indefinite article or the singular forms “a,” “an” and “the” include plural reference unless the context clearly dictates otherwise. In addition, it should be understood that the individual peptides, proteins, antigens, allergens (referred to collectively as compositions), or groups of compositions, modeled or derived from the various components or combinations of the compositions, and substituents described herein, are disclosed by the application to the same extent as if each composition or group of compositions was set forth individually. Thus, selection of particular peptides, proteins, antigens, allergens, etc. is clearly within the scope of the invention.

[0198] As used in this specification and the appended claims, the terms “comprise”, “comprising”, “comprises” and other forms of these terms are intended in the non-limiting inclusive sense, that is, to include particular recited elements or components without excluding any other element or component. Unless defined otherwise all technical and scientific terms used herein have the same meaning as commonly understood to one of ordinary skill in the art to which this invention belongs. As used herein, “about” means + or −5%. The use of the alternative (e.g., “or”) should be understood to mean one, both, or any combination thereof of the alternatives, i.e., “or” can also refer to “and.”

[0199] As used in this specification and the appended claims, any concentration range, percentage range, ratio range or other integer range is to be understood to include the value of any integer within the recited range and, when appropriate, fractions thereof (such as one tenth and one hundredth of an integer), unless otherwise indicated. For example, although numerical values are often presented in a range format throughout this document, a range format is merely for convenience and brevity and should not be construed as an inflexible limitation on the scope of the invention. Accordingly, the use of a range expressly includes all possible subranges, all individual numerical values within that range, and all numerical values or numerical ranges including integers within such ranges and fractions of the values or the integers within ranges unless the context clearly indicates otherwise. This construction applies regardless of the breadth of the range and in all contexts throughout this patent document. Thus, to illustrate, reference to a range of 90-100% includes 91-99%, 92-98%, 93-95%, 91-98%, 91-97%, 91-96%, 91-95%, 91-94%, 91-93%, and so forth. Reference to a range of 90-100%, includes 91%, 92%, 93%, 94%, 95%, 95%, 97%, etc., as well as 91.1%, 91.2%, 91.3%, 91.4%, 91.5%, etc., 92.1%, 92.2%, 92.3%, 92.4%, 92.5%, etc., and so forth. Reference to a range of 5-10, 10-20, 20-30, 30-40, 40-50, 50-75, 75-100, 100-150, and 150-175, includes ranges such as 5-20, 5-30, 5-40, 5-50, 5-75, 5-100, 5-150, 5-171, and 10-30, 10-40, 10-50, 10-75, 10-100, 10-150, 10-175, and 20-40, 20-50, 20-75, 20-100, 20-150, 20-175, and so forth. Further, for example, reference to a series of ranges of 2-72 hours, 2-48 hours, 4-24 hours, 4-18 hours and 6-12 hours, includes ranges of 2-6 hours, 2, 12 hours, 2-18 hours, 2-24 hours, etc., and 4-27 hours, 4-48 hours, 4-6 hours, etc.

[0200] Although the foregoing invention has been described in some detail by way of illustration and example for purposes of clarity of understanding, it is readily apparent to those of ordinary skill in the art in light of the teachings of this invention that certain changes and modifications may be made thereto without departing from the spirit or scope of the appended claims. The invention is further exemplified by way of the following non-limited examples.

### EXAMPLES

### Example 1

[0201] This example includes a description of materials and methods.

[0202] Donor Population.

[0203] Each donor was recruited following Institutional Review Board approval (Federal Wide Assurance number 00000032) and informed consent and assigned a study identification number. Donors were tested for allergen reactivity by skin prick tests to extracts from 32 common allergens. TG allergic donors were identified as having a skin reaction with a wheal of ≧5 mm in diameter to TG and a clinical history consistent with seasonal grass pollen allergy. Donors that had received specific immunotherapy were excluded. Non-allergic donors were identified as having negative skin prick tests to all allergens and no clinical history of allergy.

[0204] Identification of Novel TG Pollen Proteins.

[0205] Novel TG pollen proteins were identified as follows:

[0206] Assembly of TG Pollen Transcriptome.

[0207] Novel Timothy grass (TG) pollen proteins that are potential T cell antigens were identified by a combination of 2D gel/immunoblot analysis and cDNA sequence analysis of soluble pollen extract. Total RNA of TG pollen was isolated as previously described (Allergon AB, Ängelholm, Sweden) (31). In brief, 1 mg ground pollen was homogenized in 20 ml 4.2 M guanidine hiocyanate, 50 mM of BES pH 7.2, 4 mM EDTA followed by centrifugation at 15000 g for 15 min. Total RNA was prepared from the supernatant using the TRIzol LS Reagent (Invitrogen, Carlsbad, Calif., USA) according to the manufacturer's instructions. The RNA was then analyzed by high-throughput sequencing on an Illumina Genome Analyzer. First, double stranded cDNA was constructed from total RNA using the Illumina TotalPrep RNA Amplification kit (Ambion). The cDNA was then converted into fragments of approximately 200 bp using NEBNext® dsDNA Fragmentase™ (New England Biolabs). The ends were repaired, dA tails were added to the fragmented DNA using NEBNext® DNA Sample Preparation kit, and adaptors were added. Sequencing was performed on an Illumina Genome Analyzer IIx (GAIIx). Briefly, adaptor ligated cDNA was loaded into an Illumina flow cell. DNA was then bridge-amplified within the flowcell to generate millions of DNA clusters, using specific reagents and enzymes (Illumina Paired-End Cluster Generation Kit). The flow cell was then loaded onto the GAIIx equipped with a paired-end module, and 72 sequencing cycles were performed to generate sequence in both directions using Illumina Sequencing Kit v4. Replicate samples were run in 7 of the 8 lanes on the flow cell, producing over 280 million raw sequence reads of 72 bp in length. Reads went through several preprocessing steps using the FastX toolkit (33) before they were assembled into contigs: 1) the 3′ terminal base was removed; 2) low-complexity reads were removed; 3) portions of reads downstream of a low quality score were removed; 4) portions of reads corresponding to adapter sequencers were removed. The remaining reads were assembled into contigs using Velvet version 1.0.15 (32). Due to the excessive memory requirements inherent to de novo sequence assembly, the reads for each lane were considered separately and were each run with five different values for the word size parameter (k=21, 23, 25, 27, 29). The present inventors and others (33) have observed that different sets of contigs are obtained for each value for k. The contigs were further merged with Oases version 0.18.1 (D. R. Zerbino, European Bioinformatics Institute) into 1,764,158 putative transcripts. After redundancy reduction, 1,016,285 transcripts remained (including isoforms and other variants) with an average length of 245 bp and a maximum length of 6,884 bp.

[0208] 2D DIGE (Difference Gel Electrophoresis) Analysis.

[0209] The complete 2D DIGE analysis was performed by Applied Biomics (Hayward, Calif., US). Briefly, TG extract was run on two 2D gels (3-10 pH range, 12% SDS-acrylamide gel), one was Coomassie blue stained, the other was blotted onto a nitrocellulose membrane. The membrane was then incubated with 5% dried milk in PBS/0.05% Tween to block non-specific binding and subsequently probed with a serum pool from 8 TG-allergic individuals at a dilution of 1:250. IgE and IgG binding was detected using goat anti-human IgE and rabbit anti-human IgG (Sigma-Aldrich, St. Louis, Mo.) and visualized using Cy2-conjugated donkey anti-goat IgG and Cy5-conjugated donkey anti-mouse IgG antibodies (Biotium, Hayward, Calif.).

[0210] Pollen Protein Identification by Mass Spectrometry.

[0211] Mass spectral protein identification was performed by Applied Biomics (Hayward, Calif., US). Briefly, spots of interest were selected from the 2D blot and the corresponding spots were identified on the stained SDS gel and cut out, washed several times to remove staining dye and other inhibitory chemicals. The spots were then dried to absorb maximum digestion buffer. Dried 2D gel spots were rehydrated in digestion buffer containing trypsin. Proteins were digested in-gel at 37° C. and then extracted from the gel with TFA extraction buffer. Subsequently the peptides were desalted using C-18 Zip-tips (Millipore) and mixed with CHCA matrix (alpha-cyano-4-hydroxycinnamic acid) and spotted into wells of a MALDI plate. Mass spectra of the peptides in each sample were obtained using an Applied Biosystems Proteomics Analyzer. The spectra were compared to the amino acid sequences encoded by putative ORFs from the de novo assembled TG pollen transcripts. All ORFs encoding for 15 amino acid residues or longer that had a >95% confidence hit as evaluated by the Mascot software package (Matrix science) were considered hits (Table 1). The amino acid sequences encoded by these ORFs were clustered using a custom script at a sequence similarity threshold of 90% to group together highly similar protein sequences. These sequences are encoded by different transcripts from the current assembly, which could arise from splice variants, allelic variation between cells of TG pollen, and from gene families with multiple members. Amino acid sequences that form one cluster are assigned one putative protein ID (Table 1).

[0212] Assembly of a Peptide Set Predicted to Promiscuously Bind HLA Class II Molecules.

[0213] For each 15-mer peptide encoded in the ORFs in Table 2, the binding affinity to a panel of 25 HLA class II molecules was predicted (Table 3) using a consensus prediction approach (21, 22). Peptides with predicted binding scores in the top 20% for a given allele were considered potential binders. Peptides predicted to bind 13 or more HLA molecules at this threshold were considered promiscuous binders, and selected for synthesis (after eliminating peptides overlapping by more than 9 contiguous residues). If less than 5 peptides from a given protein met this threshold, the top 5 peptides were chosen, and up to 4 peptides in proteins where length was prohibitive. In total, this resulted in the selection of 822 peptides from a total of 21,506 distinct 15-mers encoded in 620 ORFs (Table 2). As a control, a set of 105 peptides was derived from the known TG allergens using the same prediction approach. The selected peptides were purchased from A and A (San Diego, Calif.) as crude material on a small (1 mg) scale. Peptides that tested positive and were included in the dominant epitope pools were purchased as purified material (>95% pure) on a 5-10 mg scale.

[0214] PBMC Isolation and In Vitro Expansion of TG Extract-Specific T Cells.

[0215] PBMCs were isolated by density gradient centrifugation from one unit of blood (˜450 ml) and cryo-preserved as described previously (12). For in vitro expansions, PBMCs were thawed and cultured in RPMI 1640 (Ω Scientific, Tarzana, Calif.) supplemented with 5% human AB serum (Cellgro, Herndon, Va.) at a density of 2×106 cells/ml in 24-well plates (BD Biosciences, San Jose, Calif.) and stimulated with TG pollen extract (50 μg/ml) (Greer, Lenoir, N.C.). Cells were kept at 37° C., 5% CO2 and additional IL-2 and IL-7 (10 U/ml, eBioscience, San Diego, Calif.) was added every 3 d after initial antigenic stimulation. On day 14, cells were harvested and screened for reactivity against TG-specific peptide pools (16-25 peptides/pool, averaging 20 peptides/pool). On day 17, peptides from positive pools were tested individually to identify the reactive epitopes.

[0216] ELISPOT Assays.

[0217] The production of IL-5 from cultured PBMCs in response to antigen stimulation was measured by ELISPOT as described previously (12). Briefly, 1×105 cells/well were incubated with peptide, peptide pool or TG extract (10 μg/ml, 5 μg/ml and 50 μg/ml, respectively). After 24 h, cells were removed and plates were incubated with 2 μg/ml biotinylated anti-human IL-5 Ab (Mabtech) at 37° C. After 2 h, plates were washed and avidin-peroxidase-complex was added (Vector Laboratories, Burlingame, Calif.) for 1 h at RT. Peroxidase-conjugated spots were developed with 3-amino-9-ethylcarvazole solution (Sigma-Aldrich, St. Louis, Mo.). Criteria for peptide pool positivity were 100 SFCs/106 PBMCs, p≦0.05, and a stimulation index (SI)≧2. Criteria for individual peptides were the same except a minimum of 20 SFCs was counted as positive.

[0218] FACS Sorting of T Cell Subpopulations.

[0219] PBMCs were thawed, washed and counted. CD4+ T cells were isolated using a CD4+ T cell isolation Kit II (Miltenyi Biotec, Auburn, Calif.) according to manufacturer's instructions and subsequently stained with antibodies to sort desired T cell subpopulations. Memory and naïve T cell populations were sorted from CD4+ cells stained with CD45RA-FITC and CCR7-BL421. The naïve population was sorted as CD45RA+CCR7+ and the memory population was sorted as CD45RA− CCR7−/+. CD45RA+ CCR7− cells were not collected. Subsequently these subpopulations were put into culture with irradiated PBMC and stimulated with TG pollen extract and cultured for 14 days with IL-2 and IL-7 added every 3 days. IL-5 production in response to stimuli was assessed by ELISPOT. For Th1 and Th2 subpopulations, cells were sorted from CD4+ cells stained with CCR4−PECy7, CCR6−PE and CXCR3−APC. Th2 cells were sorted as CCR4+CCR6−CXCR3− T cells and Th1 cells were sorted as CCR4—CCR6+CXCR3+ T cells. Sorted cells were plated into ELISPOT plates with stimulus and CD4 depleted, irradiated PBMC as APC. IL-5 production was assessed after 24 h incubation.

### Example 2

[0220] This example includes a description of studies showing that a significant fraction of TG reactive T cells in allergic donors do not target the major IgE reactive allergens.

[0221] In a previous study (12), the T cell epitopes in the ten known major IgE reactive allergens present in TG pollen were determined. Using 15-mer peptides overlapping by 10 residues that spanned the entire protein sequence of each of these allergens, 20 dominant epitopic regions accounting for the majority of T cell responses were identified. However, despite this comprehensive panel of peptides and the sensitivity of the T cell assays used, this study did not identify any IL-5 producing T cells responding to these ten allergens in 33% of the allergic donors tested despite strong responses (≧100 Spot Forming Cells (SFC)) to the whole TG extract (FIG. 1). These data suggested that a significant portion of the T cell response to TG was directed against antigens other than the known major IgE reactive allergens.

### Example 3

[0222] This example includes a description of studies showing identification of novel TG pollen proteins through a combined transcriptomics and proteomics analysis.

[0223] As few proteins apart from IgE reactive allergens have been identified in TG (or any other allergenic grasses), the identification of all proteins with significant expression in TG pollen were pursued so that a more comprehensive analysis of T cell responses to TG could be performed. mRNA of TG pollen was isolated and analyzed by high-throughput sequencing on an Illumina Genome Analyzer. A total of 1,016,285 unique, putative transcripts (including allelic variants and isoforms) were identified. Of the ten known TG allergen proteins considered in the previous study (Phl p 1, 2, 3, 4, 5, 6, 7, 11, 12 and 13), all but one (Phl p 6) were identified in the transcriptome analysis with large fragments or entire sequences matching at >90% identity. Interestingly, one transcript matched the published Phl p 6 sequence with very high significance (Blast E-value of 4E-16) but much lower sequence identity (61%). This demonstrated that the transcripts identified from TG pollen mRNA recovered the vast majority of known allergens, but the approach herein also identified putative new variants of known allergens.

[0224] Next, a proteomics approach was utilized to determine which of the newly identified transcripts encoded proteins detectable in TG pollen. For this purpose, TG pollen extract was separated by 2D gel electrophoresis and either stained with Coomassie blue or immuno-blotted using a pool of sera from 8 TG allergic donors (FIG. 2) to detect proteins reactive with IgE and/or IgG antibodies. Spots were cut out from unstained gels, trypsin digested, and analyzed by peptide fingerprint mass mapping (using MS data) and peptide fragmentation mapping (using MS/MS data) to obtain amino acid sequences. Of 131 spots picked from the 2D gels, 119 could be assigned with high confidence to one or more open reading frames (ORFs) from the transcript sequences. After clustering ORFs with >90% sequence identity, it was found that the 119 identifiable spots corresponded to 89 non-redundant protein sequences including 6 of the known TG allergens. This left 83 distinct protein sequences corresponding to previously unidentified proteins identified by spots on the gel. To these was added another 10 proteins not identified in any spots cut out of the gel, but rather in a mass spec analysis of the whole TG extract. In total, this resulted in a set of 93 novel proteins from TG pollen that was further analyzed for T cell reactivity (Table 1).

[0225] To determine if any of the proteins identified were derived from contaminants (such as bacteria) possibly present in the TG pollen extract, the amino acid sequences were ran through NCBI BLAST. Two proteins (#27 and #38) had high homology to previously identified TG proteins that are not considered allergens. Of the remaining proteins, #76, had highly homologous (BLAST E value <10-10) matches in the rice genome (the closest to TG of all fully sequenced genomes available). Of the remaining proteins, none had similarly high homology to any publicly available sequence. Overall, based on similarity to known protein sequences, it was unlikely that the sets of protein sequences contained non-plant contaminants, indicating that the sequences were from bona fide TG proteins.

### Example 4

[0226] This example includes a description of studies showing that T cells respond vigorously to epitopes from novel TG pollen proteins.

[0227] The 93 novel protein sequences were scanned for peptides predicted to bind to multiple HLA class II molecules. For each protein, all overlapping 15-mer peptides were analyzed and their binding affinity predicted to a panel of 25 HLA DR, DP and DQ molecules (Table 3) using a consensus approach of multiple machine learning methods (21,22). Non-overlapping peptides that were predicted to promiscuously bind multiple HLA class II molecules were selected from each protein. In total, this resulted in the selection of 822 peptides from a total of 21,506 distinct 15-mers (Table 2).

[0228] The 822 peptides were assembled into 42 pools of about 20 peptides each, which were analyzed for recognition by PBMCs from 20 TG allergic and 20 normal donors (Table 4). IL-5 ELISPOT assays were used to measure T cell reactivity because Th2 responses are important in allergy pathogenesis. In the studies herein, IL-5 is a more sensitive read-out in ELISPOT assays compared to other Th2 cytokines, namely IL-4 and IL-13 (FIG. 7) (15). In addition to peptide pools from novel allergens, 5 peptide pools from the ten known TG allergens assembled using the same prediction strategy were analyzed. Of the novel peptide pools 13/42 pools stimulated IL-5 production in PBMCs in over 20% of allergic donors. For the known allergen pools, 4/5 pools were recognized by over 20% of allergic donors. In contrast, none of the peptide pools elicited an IL-5 response in more than 10% of the non-allergic donors (FIG. 3a).

[0229] When comparing the combined magnitude of responses directed against the known allergens vs. the Novel Timothy Grass Antigens (NTGA), it was evident that a very significant fraction of the T cell response to TG targeted the novel antigens. In fact, 61% of responding T cells (2,101 SFC, FIG. 3b) recognized novel peptides while the response directed against the control panel of peptides from major known allergens only accounted for 39% of the T cell responses (1,345 SFC, FIG. 3b). In the non-allergic population, the IL-5 responses were much weaker. However, the difference in response magnitude between the known allergens and novel antigens was even more pronounced, with 88.4% of the response targeting the novel antigens (574 SFC) and 11.6% targeting the known allergens (75 SFC). Overall, these data showed that a majority of Th2 cell responses against TG extract were directed against antigens other than the known IgE-reactive allergens.

### Example 5

[0230] This example includes a description of studies showing identification of T cell reactive antigens and correlation with antibody reactivity.

[0231] Next, the positive peptide pools were deconvoluted to determine which individual peptides elicited the responses. IL-5 production was detected in at least one allergic donor for peptides from 54 of the 93 proteins analyzed with a total magnitude of 23,860 SFC (FIG. 8). To exclude spurious responses, T cell antigens for this study are defined as those proteins recognized in 20% or more of allergic donors, which is an established response threshold to define allergenic proteins when using skin test reactivity testing (23,24). Based on this cutoff, a total of thirteen novel T cell antigens were identified. Four of these T cell antigens were proteins targeted by both IgE and IgG, one protein was targeted by IgE only, five proteins were targeted by IgG only, and three proteins were not targeted by antibodies of either Ig class (FIG. 4). This means that eight of the novel T cell antigens were not targeted by IgE compared to five that were. The same holds true when comparing responses on the peptide level, or when considering the total number of responding T cells (Table 5). Overall, these data indicated that a sizeable fraction of the response against NTGAs is directed at proteins not recognized by IgE.

### Example 6

[0232] This example includes a description of studies showing that IL-5 responses to novel antigens are made by memory T cells that can be detected directly ex vivo.

[0233] The data presented above indicated that almost two thirds (61%) of IL-5 producing T cell responses directed against pollen proteins were directed against the novel antigens, and that a majority of those responses targeted antigens not recognized by IgE. These responses were presumably the result of in vivo priming of T cells in the allergic patients, following pollen exposure. To exclude the possibility that these T cell response may be due to in vitro priming of T cells cultured with TG extract, it was examined whether the responding T cells were associated with either a memory or naïve phenotype. For this purpose two peptide pools were assembled: The TG P20 pool comprising the 20 most dominant peptides from known TG allergens identified in a previous study (12), accounting for about 90% of IL-5 responses detected against conventional IgE-reactive TG allergens in the study population; and an NTGA P19 pool comprising 19 of the most dominant peptides selected from IgE-unreactive Novel TG Antigens. These 19 peptides account for about 40% of the total IL-5 response against all novel antigens tested in our study population.

[0234] PBMC from 6 allergic donors were sorted into memory (CD45RA−) and naïve (CD45RA+CCR7+) T cell subsets. Subsequently, cells from both subpopulations were stimulated in vitro with TG pollen extract, and tested after expansion for IL-5 production (FIG. 5). Responses to each stimulus were significantly higher in the memory population compared to the naïve population. In response to TG extract stimulation, the median SFC detected was 80 and 1,108 in the naïve and memory populations, respectively. The TG P20 elicited no response in the naïve population and a median of 350 SFC in the memory population. Stimulation with NTGA P19 resulted in a median of 12 SFC in the naïve and 540 in the memory subset. As expected, high amounts of IL-5 were detected in the naïve and memory population in response to PHA, indicating that the cells were viable and responsive to T cell stimulation. Thus, overall far fewer antigen-specific IL-5 producing cells were found in the naïve T cell subset compared to the memory subset (p=0.0002), signifying that the T cell responses to both the TG P20 and NTGA P19 peptide pools were derived from memory T cells. Of note, the two pools of peptides cover different fractions of the total response against the sets of antigens from which they were derived. The dominant known peptide pool (TG P20) is made up of the 20 most dominant peptides, which account for >90% of the total IL5 response detected against all known peptides. In contrast the dominant novel peptide pool (NTGA P19) only accounts for 40% of the total IL5 response directed against all novel peptides screened. Thus a direct quantitative comparison of the response against them is not possible.

[0235] To further substantiate that the reactivity against the novel antigens was reflective of in vivo exposure, and not from primary responses induced in vitro, it was examined if responses against novel antigens could be detected directly ex vivo without any in vitro culture expansion. Since the frequency of antigen-specific precursor cells is very low, PBMCs from eight donors were presorted to obtain enriched Th1 or Th2 subpopulations, and cells were assessed for IL-5 production in response to TG extract and the dominant known and novel peptide pools in ELISPOT assays. As expected, IL-5 production for the Th1 subpopulation was not detectable for any of the stimuli except PHA. In contrast, as shown in FIG. 6, the Th2 subpopulation (CCR4+, CXCR3−) showed significant responses to each allergen stimulus compared to media alone (extract: p=0.01, TG20: p=0.03, NTGA19: p=0.01, Wilcoxon signed rank tests).

### Example 7

[0236] This example includes a description of methods of determining in vivo efficacy of proteins and peptides of the invention, in particular, for treatment of allergy.

[0237] Peptides of the invention are evaluated for efficacy in treatment of allergy in a mouse model. In brief, six groups of BALB/cJ or HLA-transgenic mice are sensitized with repeat dosing of 1.5 micrograms of whole Timothy Grass (TG) allergen intranasally (in 25 uL) for 5×2 days over 2 weeks. This serves as a model system for investigation of allergic asthma caused by whole TG allergen.

[0238] The sensitized mice are left for one week before treatment with peptides of the invention. The treatment comprises intranasal delivery of TG peptides followed 30 minutes later by intranasal delivery of TG peptides daily for 5 days. Approximately 4 weeks later the mice are challenged with whole TG allergen for 2 days (2×15 ug/25 uL intranasally) and outcomes are measured 48 hours later. 5 doses of TG peptides are evaluated (10, 1, 0.1, 0.01 & 0.001 ug per peptide). Appropriate control experiments are conducted.

[0239] The outcomes measured are bronchial airway resistance following methacholine lung challenge (cm H20/mL/s), a measure of respiratory function, and a quantitation of inflammatory cells in the bronchoalveolar lavage (BAL) fluid.

[0240] For measurement of airway resistance, 48 hours after intranasal challenge over 2 days (2×15 ug) with Timothy Grass whole allergen, total respiratory system resistance (Rrs) is measured in response to intranasal saline and increasing doses of intravenous methacholine (MCh) using the Flexivent rodent ventilator. Using the resulting Rrs-MCh dose-response curves, indices of airway reactivity (Slope Rrs) and maximal degree of bronchoconstriction at 25 MCh mg/mL (Max Rrs @ 25 mg/mL) are measured. Values are means+/−SE.

[0241] For quantitation of inflammatory cells, bronchoalveolar lavage fluid (BALF) is assessed for total and differential inflammatory cell counts. Sections of lung tissue are stained with hematoxylin and eosin (H&E) and morphometrically quantified using a custom computerized analysis system (Northern Eclipse).

### Example 8

[0242] This example includes a description of a clinical trial protocol of proteins and peptides of the invention for treatment of allergy.

[0243] Peptides of the invention are analyzed in a randomized, placebo-controlled, blind clinical trial for efficacy in reducing allergic symptoms. The study design of the clinical trial is in accordance with good clinical practice guidelines.

[0244] Baseline skin responses to Timothy Grass allergen for all subjects are established using a Baseline Challenge between 6 and 8 days prior to study medication administration. Two intradermal injections of 0.010 HEP (histamine equivalent prick) units of commercially available standard Timothy Grass allergen is administered, separated by a 30 minute time interval, into the volar surface of the left and right forearms respectively. Subjects are assessed to ensure that they experience a Late-Phase Skin Response (LPSR) to whole Timothy Grass allergen. The magnitude of the baseline reaction is recorded as follows: Eight hours after each injection the outline of any late-phase response is drawn onto the skin with a ballpoint pen. The longest and orthogonal diameters are measured and recorded for each response, and the area of the response in each arm is calculated. The average area of response in both arms of each subject is then calculated to provide the baseline reaction. Subjects who produced a suitable baseline reaction are assigned to dosing groups, randomized and entered into the Treatment Phase.

[0245] The Treatment Phase consists of a period of 21 days for each subject. During this period one group of subjects receives a single intradermal injection of either peptides of the invention (0.03, 0.3, 3, 12 nmol of each peptide per dose) or diluent placebo at Treatment Phase Visit 1 on day one. A cohort of 8 subjects receives treatment at each dose level (6 receives the peptides of the invention and 2 placebo). The first cohort of the intradermal group receives 0.03 nmol of each peptide in the mixture and each subsequent cohort in the group receives the next higher dose level.

[0246] Intradermal injections are made into the flexor surface of the left forearm. The total volume of the injection is 60 μL for all injections. After treatment, subjects have their skin response to whole allergen retested at Treatment Phase Visit 2 on day 21 (±3 days). Skin responses to Timothy Grass allergen are assessed by measurement of the late-phase responses 8 hours following intradermal administration of 0.010 HEP (histamine equivalent prick) units of commercially available standard Timothy Grass allergen as described above. The average area of response for both arms of each subject is then calculated as described above.

[0247] This average LPSR area after treatment is then compared to the baseline LPSR area for each subject. The overall change in LPSR area for all eight patients in each cohort is then evaluated.

### Example 9

[0248] This example includes a discussion of results.

[0249] As dissolved herein, a third of TG allergic donors did not recognize any peptides derived from the 10 known IgE reactive TG allergens. This was puzzling as T cells from the same donors gave strong responses against the whole TG extract in the same sensitive ELISPOT assays. As a first explanation, the possibility that post-translational modifications might be essential for the recognition of some epitopes was considered. Such modifications would not be present in the peptides synthesized for our screening. However, a pilot study of peptides with hydroxylated prolines, which are thought to be prominent in some TG allergens (25), did not show any T cell reactivity at all. While this does not exclude that other post-translational modifications are present in T cell epitopes of TG, another hypothesis was anlayzed, namely that T cells target conventional peptides from antigens other than the 10 known IgE reactive allergens. Analysis of T cells as disclosed herein led to the identification of 93 novel TG proteins, out of which 54 elicited Th2 responses. The recognition of these novel T cell antigens provides an explanation for the originally observed gap in reactivity between known allergens and whole TG extract.

[0250] Immunological characterization of the novel TG proteins revealed that a majority were both antibody and T cell reactive. Of prime interest, it was demonstrated that T cell responses against peptides derived from these novel antigens were potent inducers of IL-5 responses in PBMCs from TG allergic patients. The T cell population that produced IL-5 against these novel antigens originated from the memory Th2 cell subset and could be detected by direct ex vivo analysis. This demonstrated the relevance of these novel T cell antigens as targets of in vivo allergic responses. Interestingly, in contrast to the findings in allergic individuals, non-allergic donors had no or very weak IL-5 responses to both the known TG allergens and the novel antigens. Without being limited to any particular theory, this may also be true for other types of T cell responses, or non-allergic individuals may show an increased magnitude of ‘tolerogenic’ responses against novel TG antigens such as IL-10 producing Tregs.

[0251] Remarkably, strong IL-5 production was seen not only in response to IgE-reactive antigens but also to several antigens that were not targeted by IgE. This suggested that Th2 responses to an antigen were not necessarily linked to IgE reacitivity. The idea of unlinked T cell help, meaning that T cells display a different antigen specificity than the B cells they affect, has been discussed in previous studies (18,20) and is also of great relevance to the immune response directed against the NTGAs. The natural structure of a pollen particle (or micro sized particles released upon hydration) provides physical linkage of various proteins, which are recognized by the immune system. Therefore, without being limited to any particular theory, the way in which pollen proteins are presented to B and T cells may allow for unlinked T cell help since the T cell-specific epitope derived from one antigen can be present on the same physical pollen particle as a second antigen recognized by B cells. As a result, the Th2 cell immune response directed against NTGAs may provide help for the allergic response directed against the major known IgE-reactive allergens present on the same pollen particle as the NTGAs.

[0252] The issue of whether T cell recognition is always necessarily linked to antibody recognition has broader significance in terms of the classic notion of linked recognition of an antigen by both helper T cells and antigen specific B cells. According to this notion, specific B cells internalize and process the antigen, leading to the presentation of antigen fragments bound by surface MHC class II molecules that can be recognized by specific T cells. This guarantees that the T cells deliver help to B cells specific for the same antigen (linked help). While in some instances it has been shown that T cells can only or preferentially provide help to B cells specific for the same protein (17,18) in other systems this was not the case (19, 20). It was found that two proteins that are present on the same particle could function together and T cells specific for one protein could provide help for B cells specific for the second protein (20). Therefore, it may be possible that as long as the antigen recognized by T cells is in some physical association with the target of B cell recognition (as in the case of a small virus, or a pollen particle), the integrity of the “antigenic bridge” is preserved.

[0253] Though the direct mechanisms by which such an immune-modulation may occur are unknown at this point, without being limited to any particular theory, there are several potential mechanism by which unlinked T cell help could potentially lead to the improvement of allergic symptoms. First, the data herein indicate that the majority of IL-5 responses are directed against NTGAs. Therefore down-regulating these responses should be of significant benefit in terms of reducing Th2-induced pathogenic effects. Secondly, induction of NTGA-specific Tregs or Th1 cells may help in the regulation, through by-stander mechanisms (26), of Th2 responses directed against known TG allergens present in the same pollen particle. Thirdly, the regulation of NTGA-specific Th2 responses may also result in downstream regulation of IgE and induction of blocking IgG antibody responses to known TG allergens, a hallmark of SIT treatment (27,28). Finally, induction of NTGA-specific Th1 or Treg cells may lead to NTGA-specific IgG production, which may interfere with IgE-induced mediator release and other immediate-type reactions by mechanisms such as steric hindrance, competition for antigen binding and inhibitory signaling through FcγRIIB (29,30). Overall, the data herein demonstrates that the novel antigens described herein are promising targets for a T cell focused specific immunotherapy, which could be safe for administration to higher risk patients such as asthmatics. As a result, therapies that specifically target T cell reactivity may provide a more efficacious and safer way to treat allergic patients, especially those suffering from severe asthma to whom current SIT regimens pose a significant risk of deleterious reactions.

[0254] This study is the first comprehensive transcriptomic- and proteomic-analysis of an inhaled allergen. 93 novel TG proteins were identified for which expression in the pollen itself was established, expanding the previously known set of such proteins by about an order of magnitude. The fact that 24 novel TG proteins targeted by IgE that do not overlap with the known IgE-reactive allergens were identified demonstrates this approach is a powerful tool for allergen discovery.

### Example 10

[0255] This example includes a description of methods of determining in vivo efficacy of proteins and peptides of the invention, in particular, for treatment of allergy caused by an allergen unrelated to a protein disclosed herein, such as treatment of allergy by bystander suppression. A more complete description of such methods may be found in US patent application publication US2012/0100164A1 (e.g., examples 3, 4, 5 and 6).

[0256] Proteins/Peptides of the invention are evaluated for efficacy in prevention sensitization to Timothy Grass Pollen in a mouse model. In brief, naïve BALB/cJ or HLA-transgenic mice are treated daily by sublingual immunotherapy (SLIT) with about 10 μg of a protein or peptide of the invention for 2 weeks. Subsequently, the mice were immunized (made sensitized) by three weekly i.p. injections of either a mix of 10 μg of a protein or peptide of the invention and about 10 μg Timothy Grass Pollen extract or 10 μg of a protein or peptide of the invention alone, both adsorbed to aluminium hydroxide.

[0257] Subsequently, the mice are challenged intra-nasally (IN) with about 10 μg of Timothy Grass Pollen extract for four days so as to induce clinically relevant readouts of a Th2-driven immune response. The mice are sacrificed one day after the last challenge and blood, bronchoalveolar fluid (BAL), spleen and cervical lymph nodes are collected for analysis. This serves as a model system for investigation of preventing allergic rhinitis by bystander suppression of an allergic response caused by Timothy Grass allergens.

[0258] Clinically relevant readouts, such as airway hyper-reactivity and the fraction of eosinophils, are obtained on the last day of IN challenge. Airway hyper-reactivity is tested by using a whole body pletysmograph. Airflow obstruction was induced by challenging the mice with increasing concentrations of aerosolized metacholine. Pulmonary airflow obstruction was measured by enhanced pause (penh) in a period of 6 minutes after administration of metacholine. Differential counting of BAL fluid is performed by centrifuging BAL fluid and remove the supernatant. The remaining pellet was re-suspended in PBS and the fraction of eosinophils was determined by an automated cell counter (Sysmex).

[0259] T-cell proliferation assay is conducted by teasing spleen cells into single cell suspension and wash three times in medium. Cells are counted and adjusted to 1.67×10⁶ cells/mL. 3×10⁵ cells are added to each well of a 96 well flat-bottomed culture plate and the cells are stimulated by 0, 5, 25 and 125 μg/mL of a protein/peptide of the invention. The cells were cultured for 6 days at 37° C. and 5% CO2. Proliferation was measured by adding 0.5 μCi of 3H-thymidine to each well for the last 18 hours of the culture period, followed by harvesting the cells and counting the incorporated radiolabel.

[0260] Down-regulation of T-cell response via bystander suppression is observed in groups of mice treated sublingually by a protein/peptide of the invention and where mice are co-sensitized with the protein/peptide of the invention and Timothy grass extract.

### Example 11

[0261] This example includes a description of methods of determining in vivo efficacy of proteins and peptides of the invention, in particular, for treatment of allergy caused by an allergen unrelated to a protein disclosed herein, such as treatment of allergy by bystander suppression. A more complete description of the methods may be found in US patent application publication US2012/0100164A1 (e.g., examples 3, 4, 5 and 6).

[0262] Proteins/Peptides of the invention are evaluated for efficacy in treating allergy caused by Timothy Grass Pollen in a mouse model. In brief, naïve BALB/cJ or HLA-transgenic mice are sensitized by three weekly i.p. injections of about 10 μg Timothy Grass Pollen extract adsorbed to aluminium hydroxide. Subsequently, the mice are treated by sublingual immunotherapy (SLIT) with 100 to 250 μg of a protein/peptide of the invention for 4 weeks, followed by 2 weeks of intranasal challenge with 10 μg Timothy Grass Pollen extract together with about 10 μg of a protein/peptide of the invention or 10 μg Timothy Grass Pollen alone.

[0263] In both sets of studies, the mice were sacrificed one day after the last challenge and blood, bronchoalveolar fluid (BAL), spleen and cervical lymph nodes were collected for analysis.

[0264] Evaluating Clinically Relevant Readouts:

[0265] Clinically relevant readouts, such as sneezes, airway hyper-reactivity and presence of eosinophils, are obtained on the last day of IN challenge.

[0266] Sneezing:

[0267] The mice are observed in an 8 min-period after intranasal administration of Timothy Grass Pollen Extract and the numbers of sneezes are counted during this period.

[0268] Airway Hyper-Reactivity:

[0269] Using a whole body pletysmograph, airflow obstruction is induced by increasing concentrations of aerosolized metacholine. Pulmonary airflow obstruction is measured by enhanced pause (penh) in a period of 6 minutes after administration of metacholine.

[0270] Differential Counting of BAL Fluid:

[0271] The BAL fluid is centrifuged and the supernatant is removed. The pellet was re-suspended in PBS and the fraction of eosinophils is determined by an automated cell counter (Sysmex).

[0272] Down-regulation of clinically relevant readouts (such as no of eosinophils in BAL) via bystander suppression are observed in groups of mice treated sublingually by a protein/peptide of the invention and where the mice are intranasally challenged to both the protein/peptide of the invention and Timothy grass extract.

TABLE 1
Panel of open reading frames corresponding to protein clusters identified by
transcriptomic analysis of Timothy Grass (TG) pollen.

| Protein id | ORF_id | ORF_sequence (SEQ ID NOS: 1-620) |
|---|---|---|
| 1 | M.693 | ........................................................................SDYLGKGVLKAVDNVNDII |
| | | GPALIGKDPTEQTELDNFMVHQLDGTKNEYGWCKQKLGANAILAVSLAVCKAGALVKKIPLYQHIANLAGNKQLVLPVPAFNVINGGSHAG |
| | | NKLAMQEFMILPIGASSFKEAMKMGVEVYHNLKSVIKKKYGQDATNVGDEGGFAPNIQENKEGLELLKTAIEKAGYTGKVVIGMDVAASEF |
| | | YGEKDQTYDLNFKEENNDGSQKISGDSLKNVYKSFVSEYPIVSIEDPFDQDDWVHYAKMTEEIGEQVQIVGDDLLVINPTRVAKATAEKSC |
| | | NALLLKVNQIGSVTESIEAVKMSKRAGWGVMTSHRSGETEDTFIADLAVGLSTGQIKTGAPCRSERLAKYNQLLRIEEELGAAAVYAGLKF |
| | | RAPVEPY |
| 1 | M.692 | ....................................................................DYLGKGVLKAVDNVNSII |
| | | GPALIGKDPTEQTELDNFMVHQLDGTKNEYGWCKQKLGANAILAVSLAVCKAGALVKKIPLYQHIANLAGNKQLVLPVPAFNVINGGSHAG |
| | | NKLAMQEFMILPIGASSFKEAMKMGVEVYHNLKSVIKKKYGQDATNVGDEGGFAPNIQENKEGLELLKTAIEKAGYTGKVVIGMDVAASEF |
| | | YGEKDQTYDLNFKEENNDGSQKISGDSLKNVYKSFVSEYPIVSIEDPFDQDDWVHYAKMTEEIGEQVQIVGDDLLVINPTRVAKATAEKSC |
| | | NALLLKVNQIGSVTESIEAVKMSKRAGWGVMTSHRSGETEDTFIADLAVGLSTGQIKTGAPCRSERLAKYNQLLRIEEELGAAAVYAGLKF |
| | | RAPVEPY |
| 1 | M.125 | .................................GNPTVEVDVCCSDGTFARAAVPSGASTGVYCALELRDGGSDYLGKGVLKGNRANVELF |
| | | KIAVLLA |
| 1 | M.714 | ...........PPPPAMAATIQSVKARQIFDSRGNPTVEVDVCCSDGIFARAAVPSGASTGVYEALELRDGGSDYLGKGVLKAVDNVNSII |
| | | GPALIGKDPTEQTELDNFMVHQLDGTKNEWGWCKQKLGANAILAVSLAVCKAGALVKKIPLYQHIANLAGNKQLVLPVPAFNVINGGSHAG |
| | | NKLAMQEFMTLPTGASSFKEAMKMGVEVYHNLKSVTKKKYGQDATNVGDEGGFAPNTQENKEGLELLKTAIEKAGYTGKVVIGMDVAASEF |
| | | YGEKDQTYDLNFKEENNDGSQKISGDSLKNVYKSFVSEYPIVSIEDPFDQDDWVHYAKMTEEIGEQVQIVGDDLLVTNPTRVAKAIAEKSC |
| | | NALLLKVNQIGSVTESIEAVKMSKRAGWGGMTSHRSGETEDTFIADLAVGLSTGQIKTGAPCRSERLAKYNQLLRIEEELGAAAVYAGLKF |
| | | RA |
| 1 | M.721 | .................................GNPTVEVDVCCSDGTFARAAVPSGASTGVIEALEIRDGGSDYLGKGVLKAVDNVNSII |
| | | GPALLGKDPTEQTELDNFMVHQLDGTKNEWGWCKQKLGANAILAVSLAVCKAGALVKKIPLYQHIANLAGNKQLVLPVPAFNVINGGSHAG |
| | | NKLAMQEFMTLPTGASSFKEAMKMGVEVYHNLKSVTKKKYGQDATNVGDEGGFAPNTQENKEGLELLKTAIEKAGYTGKVVIGMDVAASEF |
| | | YGEKDQTYDLNFKEENNDGSQKISGDSLKNVYKSFVSEYPIVSIEDPFDQDDWVHYAKMTEEIGEQVQIVGDDLLVTNPTRVAKAIAEKSC |
| | | NALLLKVNQIGSVTESIEAVKMSKRAGWGGMTSHRSGETEDTFIADLAVGLSTGQIKTGAPCRSERLAKYNQLLRIEEELGAAAVYAGLKF |
| | | RAPVEPY |
| 1 | M.705 | .........................................................................DYLGKGVLKAVDNVNSII |
| | | GPALLGKDPTEQTELDNFMVHQLDGTKNEWGWCKQKLGANATLAVSLAVCKAGALVKKIPLYQHIANLAGNKQLVLPVPAFNVINGGSHAG |
| | | NKLAMQEFMILPTGASSFKEAMKMGVEVYHNLKSVIKKKYGQDATNVGDEGGFAPNTQENKEGLELLKTAIEKAGYTGKVVIGMDVAASEF |
| | | YGEKDQTYDLNFKEENNDGSQKISGDSLKNVYKSFVSEYPIVSIEDPFDQDDWVHYAKMTEEIGEQVQIVGDDLLVTNPTRVAKAIAEKSC |
| | | NALLLKVNQIGSVTESIEAVKMSKRAGWGGMTSHRSGETEDTFIADLAVGLSTGQIKTGAPCRSERLAKYNQLLRIEEELGAAAVYAGLKF |
| | | RAPVEPY |
| 1 | M.591 | ........................................................................................... |
| | | .................................................................ANLAGNKQLVLPVPAFNVINGGSHAG |
| | | NKLAMQEFMTLPTGASSFKEAMKMGVEVYHNLKSVTKKKYGQDATNVGDEGGFAPNTQENKEGLELLKTAIEKAGYTGKVVIGMDVAASEF |
| | | YGEKDQTYDLNFKEENNDGSQKISGDSLKNVYKSFVSEYPIVSIEDPFDQDDWVHYAKMTEEIGEQVQIVGDDLLVTNPTRVAKAIAEKSC |
| | | NALLLKVNQIGSVTESIEAVKMSKRAGWGGMTSHRSGETEDTFIADLAVGLSTGQIKTGAPCRSERLAKYNQLLRIEEELGAAAVYAGLKF |
| | | RA |
| 1 | M.418 | .LRFPKASRSIPPPPAMAATIQSVKARQIFDSRGNPIVEVDVCCSDGTFARAAVPSGASTGVYEALELRDGGSDYLGKGVLKAVDNVNSII |
| | | GPALLGKDPTEQTELDNFMVHQLDGTKNEWGWCKQKLGANATLAVSLAVCKAGALVKKIPLYQHIANLAGNKQL |
| 1 | M.689 | .......RSIPPPPPAMAATIQSVKARQIFDSRGNPTVEVDVCCSDGIFARAAVPSGASTGVYEALELRDGGSDYLGKGVLKAVDNVNSII |
| | | GPALLGKDPTEQTELDNFMVHQLDGTKNEWGWCKQKLGANAILAVSLAVCKAGALVKKIPLYQHIANLAGNKQLVLPVPAFNVINGGSHAG |
| | | NKLAMQEFMTLPTGASSFKEAMKMGVEVYHNLKSVTKKKYGQDATNVGDEGGFAPNTQENKEGLELLKTAIEKAGYTGKVVIGMDVAASEF |
| | | YGEKDQTYDLNFKEENNDGSQKISGDSLKNVYKSFVSEYPIVSIEDPFDQDDWVHYAKMTEEIGEQVQIVGDDLLVTNPTRVAKAIAEKSC |
| | | NALLLKVNQIGSVTESIEAVKMSKRAGWGGMTSHRSGETEDTFI |
| 1 | M.644 | ........................................................................SDYLGKGVLKAVDNVNSII |
| | | GPALIGKDPTEQTELDNFMVHQLDGTKNEWGWCKQKLGANAILAVSLAVCKAGALVKKIPLYQHIANLAGNKQLVLPVPAFNVINGGSHAG |
| | | NKLAMQEFMTLPTGASSFKEAMKMGVEVYHNLKSVTKKKYGQDATNVGDEGGFAPNTQENKEGLELLKTAIEKAGYTGKVVIGMDVAASEF |
| | | YGEKDQTYDLNFKEENNDGSQKISGDSLKNVYKSFVSEYPIVSIEDPFDQDDWVHYAKMTEEIGEQVQIVGDDLLVTNPTRVAKAIAEKSC |
| | | NALLLKVNQIGSVTESIEAVKMSKRAGWGGMTSHRSGETEDTFIADLAVGLSTGQIKTGA |
| 1 | M.414 | .....ASRSIPPPPAMAATIQSVKAIRQIFDSRGNPIVEVDVCCSDGTFARAAVPSGASTGVYEALELRDGGSDYLGKGVLKAVDNVNSII |
| | | GPALIGKDPTEQTELDNFMVHQLDGTKNEWGWCKQKLGANATLAVSLAVCKAGALVKKIPLYQHIANLAGNKQL |
| 1 | M.624 | .................................GNPTVEVDVCCSDGIFARAAVPSGASTGVYEALELRDGGSDYLGKGVLKAVDNVNSII |
| | | GPALIGKDPTEQTELDNFMVHQLDGTKNEWGWCKQKLGANAILAVSLAVCKAGALVKKIPLYQHIANLAGNKQLVLPVPAFNVINGGSHAG |
| | | NKLAMQEFMTLPTGASSFKEAMKMGVEVYHNLKSVTKKKYGQDATNVGDEGGFAPNTQENKEGLELLKTAIEKAGYTGKVVIGMDVAASEF |
| | | YGEKDQTYDLNFKEENNDGSQKISGDSLKNVYKSFVSEYPIVSIEDPFDQDDWVHYAKMTEEIGEQVQIVGDDLLVTNPTRVAKAIAEKSC |
| | | NALLL |
| 1 | M.617 | ....................................TVEVDVCCSDGIFARAAVPSGASTGVYEALELRDGGSDYLGKGVLKAVDNVNSII |
| | | GPALIGKDPTEQTELDNFMVHQLDGTKNEWGWCKQKLGANAILAVSLAVCKAGALVKKIPLYQHIANLAGNKQLVLPVPAFNVINGGSHAG |
| | | NKLAMQEFMTLPTGASSFKEAMKMGVEVYHNLKSVTKKKYGQDATNVGDEGGFAPNTQENKEGLELLKTAIEKAGYTGKVVIGMDVAASEF |
| | | YGEKDQTYDLNFKEENNDGSQKISGDSLKNVYKSFVSEYPIVSIEDPFDQDDWVHYAKMTEEIGEQVQIVGDDLLVTNPTRVAKAIAEKSC |
| | | NALLL |
| 1 | M.704 | ....................................TVEVDVCCSDGIFARAAVPSGASTGVYEALELRDGGSDYLGKGVLKAVDNVNSII |
| | | GPALIGKDPTEQTELDNFMVHQLDGTKNEWGWCKQKLGANAILAVSLAVCKAGALVKKIPLYQHIANLAGNKQLVLPVPAFNVINGGSHAG |
| | | NKLAMQEFMTLPTGASSFKEAMKMGVEVYHNLKSVTKKKYGQDATNVGDEGGFAPNTQENKEGLELLKTAIEKAGYTGKVVIGMDVAASEF |
| | | YGEKDQTYDLNFKEENNDGSQKISGDSLKNVYKSFVSEYPIVSIEDPFDQDDWVHYAKMTEEIGEQVQIVGDDLLVTNPTRVAKAIAEKSC |
| | | NALLLKVNQIGSVTESIEAVKMSKRAGWGGMTSHRSGETEDTFIADLAVGLSTGQIKTGAPCRSERLAKYNQLLRIEEELGAAAVYAGL |
| 1 | M.331 | .................................GNVTVEVDVCCSDGIFARAAVPSGASTGVYEALELRDGGSDYLGKGVLKAVDNVNSII |
| | | GPALIGKDPTEQTELDNFMVHQLDGTKNEWGWCKQKVFFNTSADADAGAVAR |
| 1 | M.604 | ........................................................................................... |
| | | ........................................AILAVSLAVCKAGALVKKIPLYQHIANLAGNKQLVLPVPAFNVINGGSHAG |
| | | NKLAMQEFMTLPTGASSFKEAMKMGVEVYHNLKSVTKKKYGQDATNVGDEGGFAPNTQENKEGLELLKTAIEKAGYTGKVVIGMDVAASEF |
| | | YGEKDQTYDLNFKEENNDGSQKISGDSLKNVYKSFVSEYPIVSIEDPFDQDDWVHYAKMTEEIGEQVQIVGDDLLVTNPTRVAKAIAEKSC |
| | | NALLLKVNQIGSVTESIEAVKMSKRAGWGGMTSHRSGETEDTFIADLAVGLSTGQIKTGAPCRSERLAKYNQLLRIEEELGAAAVYAGLKF |
| 1 | M.291 | .................................GNPTVEVDVCCSDGIFARAAVPSGASTGVYEALELRDGGSDYLGKGVLKAVDNVNSII |
| | | GPALIGKDPTEQTELDNFMVHQLDGTKNEWGWCKQKLGAN |
| 1 | M.151 | ......IDPSSSSSPAMAATIQSVKARQIFDSRGNPTVEVDVCCSDGTFARAAVPSGASTGVYEALELRDGGS |
| 1 | M.498 | ......IDPSSSSSPAMAATIQSVKARQIFDSRGNPTVEVDVCCSDGTFARAAVPSGASTGVYEALELRDGGSDYLGKGVLKAVDNVNSII |
| | | GPALIGKDPIEQTELQNEMVHQLQGTKNEVGWCKQKLGANAILAVSLAVCKAGALVENIPLYQHIANLAGNKQLVLPVPAFNVINGGSHAG |
| | | NKLAMQEEMILPIGASSFKEAMKMGVEVYRNLKKSVIKRKYGQQATNV |
| 1 | M.561 | ........................................................................................... |
| | | ............................................VSLAVCKAGALVKKIPLYQHIANLAGNKQLVLPVPAFNVINGGSHAG |
| | | NKLAMQEFMILPTGASSFKEAMKMGVEVYHNLKSVIKKKYGQDATNVGDEGGFAPNIQENKEGLELLKTAIEKAGYTGKVVIGMDVAASEF |
| | | YGEKDQTYDLNFKEENNDGSQKISGDSLKNVYKSFVSEYPIVSIEDPFDQDDWVHYAKMTEEIGEQVQIVGDDLLVTNPTRVAKAIAEKSC |
| | | NALLLKVNQIGSVTESIEAVKMSKRAGWGVMTSHRSGETEDTFIA |
| 1 | M.399 | ALRFPKASRSIPPPPAMAATIQSVKARQIFDSRQNPTVEVDVCCEDGTFARAAVPSGASIGVYEALELRDGGSDYLGKGVLKAVDNVNSII |
| | | GFALIGKDPIEQIELDNFMVHQLDGIRNEWGWCKQKLGANAILAVSLAICKAGASVKKIPLYQ |
| 1 | M.603 | ........................................................................................... |
| | | ............................................VSLAVCKAGALVKKIPLYQHIANLAGNKQLVLPVPAFNVINGGSHAG |
| | | NKLAMQEFMILPTGASSFKEAMKMGVEVYHNLKSVIKKKYGQDATNVGDEGGFAPNIQENKEGLELLKTAIEKAGYTGKVVIGMDVAASEF |
| | | YGEKDQTYDLNFKEENNDGSQKISGDSLKNVYKSFVSEYPIVSIEDPFDQDDWVHYAKMTEEIGEQVQIVGDDLLVTNPTRVAKAIAEKSC |
| | | NALLLKVNQIGSVTESIEAVKMSKRAGWGVMTSHRSGETEDTFIADLAVGLSTGQIKTGAPCRSERLAKYNQLLRIEEELGAAAVYAGLKF |
| | | RA |
| 1 | M.226 | ALRFPKASRSIPPPPAMAATIQSVKARQIFDSRGNPIVEVDVCCSDGTFARAAVPSGASTGVYFALELRDGGSDYLGK |
| 2 | M.636 | ........................................................................................... |
| | | ........................................................................................... |
| | | .................................................................YGFPIVQRFLEGASSIDNHFRIASFE |
| | | KNIPVLLGLLSVWNVSFLGYPARAILPYSQALEKLAPHIQQLSMESNGKGVSIDGVPLPYEAGEIDFGEPGTNGQHSFYQLIHQGRVIPCD |
| | | FIGVIKSQQPVYLKGETVSNHDELMSNFFAQPDALAYGKNPEQLRSENVSENLIPHKTFKGNRPSLSFLLSSLSAYEIGQLLAIYEHRIAV |
| | | QGFIWGINSFDQWGVELGKSLASQVRKQLHASRMEGKPVEGFNPSSASLLARYLAVEPSTPYDIIVLPKV |
| 2 | M.473 | ................................................ENRSVLRVALRAPRDAVINSDGVNVVPEVWSVKDKIKQFSEIF |
| | | RSGSWVGATGKPLINVVSVGIGGSFLGPLFVHTALQTDPEAAESAKGRQLRFLANVDPVDVARSIKDLDPETTLVVVVSKTFTTAETMLNA |
| | | RIIKEWIVSSLGPQAVSKHMIAVSTNLKLVKEFGIDPNNAFAFWDWVGGRYSVCSAVGVLPLSLQYGFP |
| 2 | M.437 | ...............................................................................VKDKIKQFSEIF |
| | | RSGSWVGATGKPLINVVSVGIGGSFLGPLFVHTALQTDPEAAESAKGRQLRFLANVDPVDVARSIKDLDPETTLVVVVSKTFTTAETMLNA |
| | | RIIKEWIVSSLGPQAVSKHMIAVSTNLKLVKEFGIDPNNAFAFWDWVGGRYSVCSAVGVLPLSLQYGFP |
| 2 | M.634 | ........................KLAEAAKLKEKIEKMFNGEKINSTENRSVLHVALRAPRDAVINSDGVNVVPEVWSVKDKIKQFSEIF |
| | | RSGSWVGATGKPLTNVVSVGIGGSFLGPLFVHTALQTDPEAAESAKGRQLRFLANVDPVDVARSIKDLDPEITLVVVVSKTFTTAETMLNA |
| | | RTIKEWIVSSLGPQAVSKHMIAVSTNLKLVKEFGIDPNNAFAFWDWVGGRYSVCSAVGVLPLSLQYGFPIVQRFLEGASSIDNHFRTASFE |
| | | KNIPVLLGLLSVWNVSFLGYPARAILPYSQALEKLAPHIQQLSMESNGKGVSIDGVPLPYEAGEIDFGEPGTNGQHSFYQLIHQGRVIPCD |
| | | FYDANK |
| 2 | M.676 | ........................KLAEAAKLKEKIEKMFNGEKINSTENRSVLHVALRAPRDAVINSDGVNVVPEVWSVKDKIKQFSEIF |
| | | RSGSWVGATGKPLTNVVSVGIGGSFLGPLFVHTALQTDPEAAESAKGRQLRFLANVDPVDVARSIKDLDPEITLVVVVSKTFTTAETMLNA |
| | | RTIKEWIVSSLGPQAVSKHMIAVSTNLKLVKEFGIDPNNAFAFWDWVGGRYSVCSAVGVLPLSLQYGFPIVQRFLEGASSIDNHFRTASFE |
| | | KNIPVLLGLLSVWNVSFLGYPARAILPYSQALEKLAPHIQQLSMESNGKGVSIDGVPLPYEAGEIDFGEPGTNGQHSFYQLIHQGRVIPCD |
| | | FIGVIKSQQPVYLKGETVSNHDELMSNFFAQPDALAYGKIPEQ |
| 2 | M.422 | ........................................NGEKINSTENRSVLHVALRAPRDAVINSDGVNVVPEVWSVKDKIKQFSETF |
| | | RSGSWVGATGKPLTNVVSVGIGGSFLGPLFVHTALQTDPEAAESAKGRQLRFLANVDPVDVARSIKDLDPETTLVVVVSKTFTTAETMLNA |
| | | RTIKEWIVSSLGPQAVSKHMIAV |
| 2 | M.431 | ........................................NGEKINSTENRSVLHVALRAPRDAVINSDGVNVVPEVWSVKDKIKQFSETF |
| | | RSGSWVGATGKPLTNVVSVGIGGSFLGPLFVHTALQTDPEAAESAKGRQLRFLANVDPVDVARSIKDLDPETTLVVVVSKTFTTAETMLNA |
| | | RTIKEWIVSSLGPQAVSKHMIAVST |
| 2 | M.387 | .............................................................RDAVINSDGVNVVPEVWSVKDKIKQFSETF |
| | | RSGSWVGATGKPLTNVVSVGIGGSFLGPLFVHTALQTDPEAAESAKGRQLRFLANVDPVDVARSIKDLDPETTLVVVVSKTFTTAETMLNA |
| | | RTIKEWIVSSLGPQAVSKHMIAVST |
| 2 | M.722 | ...................................................................................IKQFSEIF |
| | | RSGSWVGATGKPLTNVVSVGIGGSFLGPLFVHTALQTDPEAAESAKGRQLRFLANVDPVDVARSIKDLDPEITLVVVVSKTFTTAETMLNA |
| | | RTIKEWIVSSLGPQAVSKHMIAVSTNLKLVKEFGIDPNNAFAFWDWVGGRYSVCSAVGVLPLSLQYGFPIVQRFLEGASSIDNHFRTASFE |
| | | KNIPVLLGLLSVWNVSFLGYPARAILPYSQALEKLAPHIQQLSMESNGKGVSIDGVPLPYEAGEIDFGEPGTNGQHSFYQLIHQGRVIPCD |
| | | FIGVIKSQQPVYLKGETVSNHDELMSNFFAQPDALASRKTPAPLRSENVSENLIPHKTFKGNRPSLSFLLSSLSAYEIGQLLAIYEHRIAV |
| | | QGFIWGINSFDQWGVELGKSLASQVRKQLHASRMEGKPVEGFNPSSASLLARYLAVEPSTPYDTTVLPKV |
| 2 | M.610 | ...................................................................................IKQFSEIF |
| | | RSGSWVGATGKPLTNVVSVGIGGSFLGPLFVHTALQTDPEAAESAKGRQLRFLANVDPVDVARSIKDLDPEITLVVVVSKTFTTAETMLNA |
| | | RTIKEWIVSSLGPQAVSKHMIAVSTNLKLVKEFGIDPNNAFAFWDWVGGRYSVCSAVGVLPLSLQYGFPIVQRFLEGASSIDNHFRTASFE |
| | | KNIPVLLGLLSVWNVSFLGYPARAILPYSQALEKLAPHIQQLSMESNGKGVSIDGVPLPYEAGEIDFGEPGTNGQHSFYQLIHQGRVIPCD |
| | | FIGVIKSQQPVYLKGETVSNHDELMSNFFAQPDALAYGKIPEHSR |
| 2 | M.574 | AEFEGVFLDFARQQATTETVDKLFKLAEAAKLKEKIEKMFNGEKINSIENRSVLHVALRAPRDAVINSDGVNVVPEVWSVKDKIKQFSEIF |
| | | RSGSWVGATGKPLINVVSVGIGGSFLGPLFVHTALQTDPEAAESAKGRQLRFLANVDPVDVARSIKDLDPETTLVVVVSKTFTTAETMLNA |
| | | RIIKEWIVSSLGPQAVSKHMIAVSTNLKLVKEFGIDPNNAFAFWDWVGGRYSVCSAVGVLPLSLQYGFPIVQRFLEGASSIDNHFRTASFE |
| | | KNIPVLLGLLSV |
| 2 | M.531 | ........................................................................................... |
| | | .......................................EAAESAKGRQLRFLANVDPVDVARSIKDLDPETTLVVVVSKTFTTAETMLNA |
| | | RIIKEWIVSSLGPQAVSKHMIAVSTNLKLVKEFGIDPNNAFAFWDWVGGRYSVCSAVGVLPLSLQYGFPIVQRFLEGASSIDNHFRTASFE |
| | | KNIPVLLGLLSVWNVSFLGYPARAILPYSQALEKLAPHIQQLSMESNGKGVSIDGVPLPYEAGEIDFGEPGTNQQHEFYQLINQGRVIPCD |
| | | FIGVIFSQQPVYLK |
| 3 | M.305 | .....ILLVFAETAEPEVKVVDLTILSPDRPDLVLPIPFVADEKGYAFALKDGSTYSFRFSFIVSNNIVSGLKYTNTVWKTGVRVENQKMM |
| | | LG |
| 3 | M.282 | LLGQVDTEQLGETAEPEVKVVDLTILSPDRPDLVLPIPFVADEKGYAFALKDGSTYSFRFSFIVSNNIVSGLKYTNTVWKTGVRVENQKMM |
| | | LG |
| 3 | M.271 | ...........ETAEPEVKVVDLTILSPDRPDLVLPIPFVADEKGYAFALKDGSTYSFRFSFIVSNNIVSGLKYTNTVWKTGVRVENQKMM |
| | | LGTFSPQPEP |
| 3 | M.159 | ....................................................................................VENQKMM |
| | | LGTFSPQPEPYIYVGEEESTTPAGIFARGSYSAKLKFVDDDGKVYLEMSYYFEIRKDWPIGQ |
| 3 | M.83 | ........................................................................................... |
| | | ...........IYVGEEESTTPAGIFARGSYSAKLKFVDDDGKVYLEMSYYFEIRKDWPIGQ |
| 3 | M.348 | .......................................................YSFRFSFIVSNNIVSGLKYTNTVWKTGVRVENQKMM |
| | | LGTFSPQPEPYIYVGEEESTTPAGIFARGSYSAKLKFVDDDGKVYLEMSYYFEIRKDWPIGQ |
| 3 | M.285 | .......................................................YSFRFSFIVSNNIVSGLKYTNTVWKTGVRVENQKMM |
| | | LGTFSPQPEPYIYVGEEESTTPAGIFARGSYSAKLKFVDDDGKVYLEMSYYFEIRKDWP |
| 3 | M.288 | ...........HTAEPHVKVVDLTTISPDRPDLVLPIPFVADERGYAEALKDGSTYSFRFSFIVSNNIVSGLEYTNIVNKTGVRVENQKMM |
| | | LGTFSPQPEPYIYVGEE |
| 3 | M.287 | ..............................................................................WKTGVRVENQKMM |
| | | LGTFSPQPEPYIYVGEEESTTPAGIFARGSYSAKLKFVDDDGKVYLEMSYYFEIRKDWPTGQ |
| 3 | M.232 | .......EQLGHTAEPHVKVVDLTTISPDRPDLVLPIPFVADERGYAEALKDGSTYSFRFSFIVSNNIVSGLEYTNIVNKTGVR |
| 4 | M.715 | .....MKTIFDFESIKKLLASPKFSFCFDGLHGVAGAYAKRMFVDELGASESSLLNCVPKEDFGGGHPDPNLTYAKELVERMGLGKSSSNV |
| | | EPPEFGAAADGDADRNMVLGKRFFVTPSDSVAIIAANAVQSIPYFASGLKGVARSMPTSAALDVVAKNLNLKFFEVPTGWKFFGNLMDAGM |
| | | CSVCGEESFGTGSDHIREKDGIWAVLAWLSIIAYKNKDNLGGDKLVSVEDIVLQHWATYGRHYYTRYDYENVDAEAAKELMANLVKMQSAL |
| | | SDNVKLIKEIQPDVAEVVSSADEFEYKDPVDGSVSHQGIRYLFGDGSRLVFRLSGTGSVGATIRIYIEQYEKDSSKTGRESSDALSPLVDV |
| | | ALKLSKIKEYIGRSAPTVIT |
| 4 | M.725 | .....MKTIFESIKKLLASPKFSFCFDPGKGVAGAYAKRMFVDELGASESELINCVDPKEDFGGGHPNDFNLIYAKELVERMGIGKSSSNV |
| | | EPPEFGAAADGDADRNMVLGKRFFVTPSDSVAIIAANAVQSIPYFASGLKGVARSMPTSAALDVVAKNLNLKFFEVPTGWKFFGNLMDAGM |
| | | CSVGGEEEFGTGSDIHERLGIWLAVLAWLETIAYKNKDNLGGDKLVSVEDIVLOHWATYGRHVYYTRYDYENVDAEAAFELMANLKMGSAL |
| | | SDVNKLTKEIQPDVAEVVSADNEFZYKDFVDGEVSKHQGIQYLFGDTGSRLSGTGSVATIRIYVIEQYEKDESKPSTGRESSDALSFLVDV |
| | | ALKLSNIKEYTGRSAPIVIS |
| 4 | M.694 | PSPFNSRTIFDFESIKKLLASPKFSFCFDGLHGVAGAYAKRMFVDELGASESSLLNCVPKEDFYGGGHPDNLTYAKELVERMGLGKSSSNV |
| | | EPPEFGAAADGDADRNMVLGKRFFVTPSDSVAIIAANAVQSIPYFASGLKGVARSMPTSAALDVVAKNLNLKFFEVPTGWKFFGNLMDAGM |
| | | CSVCGEESFGTGSDHIREKDGIWAVLAWLSIIAYKNKDNLGGDKLVSVEDIVLQHWATYGRHYYTRYDYENVDAEAAKELMANLVKMQSAL |
| | | SDVNKLIKEIQPDVAEVVSADEFEYKDPVDGSVSKHQGIRYLFGDGSRLVFRLSGTGSVGATIRIYIEQYEKDSSKTGRESSDALSPLVDV |
| | | ALKLSKIKEYTGRSAPTVIT |
| 4 | M.701 | PSPFNSRTIFDFESIKKLLASPKFSFCFDGLHGVAGAYAKRMFVDELGASESYSLLNCVPKEDFGGGHPDNLTYAKELVERMGLGKSSSNV |
| | | EPPEFGAAADGDADRNMVLGKRFFVTPSDSVAIIAANAVQSIPYFASGLKGVARSMPTSAALDVVAKNLNLKFFEVPTGWKFFGNLMDAGM |
| | | CSVCGEESFGTGSDHIREKDGIWAVLAWLSIIAYKNKDNLGGDKLVSVEDIVLQHWATYGRHYYTRYDYENVDAEAAKELMANLVKMQSAL |
| | | SDVNKLIKEIQPDVAEVVSADEFEYKDPVDGSVSKHQGIRYLFGDGSRLVFRLSGTGSVGATIRIYIEQYEKDSSKTGRESSDALSPLVDV |
| | | ALKLSKIKEYTGRSAPTVIT |
| 4 | M.595 | ...KLMKTIFDFESIKKLLASNPKFSFCFDGLHGVAGAYAKRMFVDELGASESSLLNCVPKEDFGGGHPDNLTYAKELVERMGLGKSSSNV |
| | | EPPEFGAAADGDADRNMVLGKRFFVTPSDSVAIIAANAVQSIPYFASGLKGVARSMPTSAALDVVAKNLNLKFFEVPTGWKFFGNLMDAGM |
| | | CSVCGEESFGTGSDHIREKDGIWAVLAWLSIIAYKNKDNLGGKLVSVEDIVLQHWATYGHRHYYTRYDYENVDAEAAKELMANLVKMQSAL |
| | | SDVNKLIKEIQPDVAEVVSADEFEYKDPVDGSVS |
| 4 | M.718 | ...KLMKTIFDFESIKKLLASPKFSFCFDGLHGVAGAYAKRMFVDELGASESSLLNCVPKEDFGGGHPYDNLTYAKELVERMGLGKSSSNV |
| | | EPPEFGAAADGDADRNMVLGKRFFVTPSDSVAIIAANAVQSIPYFASGLKGVARSMPTSAALDVVAKNLNLKFFEVPTGWKFFGNLMDAGM |
| | | CSVCGEESFGTGSDHIREKDGIWAVLAWLSIIAYKNKDNLGGKLVSVEDIVLQHWATYGRHYYHTRYDYENVDAEAAKELMANLVKMQSAL |
| | | SDNKLIKEIQPDVAEVVSADEFEYKDPVDGSVSKHQGIRYLFGDGSRLVFRLSGTGSVGATIRIYTEQYTEKDSSKTGRESSDALSPLVDV |
| | | ALNLSKIKEYTGRSAPTVIT |
| 4 | M.720 | ...KLMKTIFDFESIKKLLASPKFSFCFDGLHGVAGAYAKRMFVDELGASESSLLNCVPKHEDFGGGHPDNLTYAKELVERMGLGKSSSNV |
| | | EPPEFGAAADGDADRNMVLGKRFFVTPSDSVAIIAANAVQSIPYFASGLKGVARSMPTSAALDVVAKNLNLKFFEVPTGWKFFGNLMDAGM |
| | | CSVCGEESFGTGSDHIREKDGIWAVLAWLSIIAYKNKDNLGGKLVSVEDIVLQHWAHTYGRHYYTRYDYENVDAEAAKELMANLVKMQSAL |
| | | SDNKLIKEIQPDVAEVVSADEFEYKDPVDGSVSKHQGIRYLFGDGSRLVFRLSGTGSVGATIRIYTLEQYEKDSSKTGRESSDALSPLVDV |
| | | ALNLSKIKEYTGRSAPTVIT |
| 4 | M.723 | ......KTIFDFESIKKLLASPKFSFCFDGLHGVAGAYAKRMFVDELGASESSLLNCVPKHEDFGGGHPDNLTYAKELVERMGLGKSSSNV |
| | | EPPEFGAAADGDADRNMVLGKRFFVTPSDSVAIIAANAVQSIPYFASGLKGVARSMPTSAALDVVAKNLNLKFFEVPTGWKFFGNLMDAGM |
| | | CSVCGEESFGTGSDHIREKDGIWAVLAWLSIIAYKNKDNLGGKLVSVEDIVLQHWATYGLRHYYTRYDYENVDAEAAKELMANLVKMQSAL |
| | | SDNKLIKEIQPDVAEVVSADEFEYKDPVDGSVSKHQGIRYLFGDGSRLVFRLSGTGSVGATIRIYTHEQYEKDSSKTGRESSDALSPLVDV |
| | | ALNLSKIKEYTGRSAPTVIT |
| 4 | M.648 | ...KLMKTIFDFESIKKLLASPKFSFCFDGLHGVAGAYAKRMFVDELGASESSLLNCVPKEDMFGGGHPDNLTYAKELVERMGLGKSSSNV |
| | | EPPEFGAAADGDADRNMVLGKRFFVTPSDSVAIIAANAVQSIPYFASGLKGVARSMPTSAALDVVAKNLNLKFFEVPTGWKFFGNLMDAGM |
| | | CSVCGEESFGTGSDHIREKDGIWAVLAWLSIIAYKNKDNLGGKLVSVEDIVLQHFWATYGRHYYTRYDYENVDAEAAKELMANLVKMQSAL |
| | | SDNKLIKEIQPDVAEVVSKADEFEYKDPVDGSVSKHQGIRYLFGDGSRLLVFRLSGTGSVGAFTIRIYTEQYEKLDSSKTGRESSDALSPL |
| 4 | M.662 | ....NSRTIFDFESINKLLASPKFSFCFDGLHGVAGAYAKRMFVDELGASESSLLNCVPKLEDFGGGHPDPNLIAKELVERMGLGKSSSNV |
| | | EPPEFGAAADGDADRNMVLGKRFFVTPSDSVAIIAANAVQSIPYFASGLKGVARSMPTSAALDVVAKNLNLKFFEVPTGWKFFGNLMDAGM |
| | | CSVCGEESFGTGSDHIREKDGIWAVLAWLSIIAYKNKDNLGGKLVSVEDIVLQHWATYGRHYFYTRYDYENVDAEAAKELMANLVKMQSAL |
| | | SDNKLIKEIQPDVAEVVSADEFEYKDPVDKGSVSKHQGIRYLFGDGSRLVFRLSGTGSVGATIRIYTEQYEKDSSKTGRESSDALSPLVDV |
| | | ALNLSKIKEYTG |
| 4 | M.576 | ........................................................................................... |
| | | ..............................................................................GWKFFGNLMDAGM |
| | | CSVCGEESFGTGSDHIREKDGIWAVLAWLSIIAYKNKDNLGGKLVSVEDIVLQHWATYGRHYLYTRYDYENVDAEAAKELMANLVKMQSAL |
| | | SDNKLIKEIQPDVAEVVSADEFEYKDPVDGSHVSKHQGIRYLFGDGSRLVFRLSGTGSVGATIRIYTEQYEKDSSKTGRESSDALSPLVDV |
| | | ALNLSKIKEYTGRSAPTVIT |
| 5 | M.618 | .............................DEYLAAVAKARRKLRGLIAEKNCAPLMLRIAWSHAGTFDVATKIGGPFGTMRCPAELAHGAN |
| | | AGLDIAVRLLEPIKEQVPILSYADFYQLAGVVAVEITGGPEVPFHPGRQDKTEPPPEGRLPDATLGSDHLRQVFTAQMGLSDQDIVALSGG |
| | | HTLGRCHKERSGFEGAWTANPLIFDNSYFTELLTGEKEGLLQLPTDKTLLTDPAFRPLVDKYAADEDAFFADYAEAHLKLSELGFGEATEG |
| | | CC |
| 5 | M.631 | .................GAMAAKCYPTVSDEYLAAVAKARRKLRGLIAEKNCAPLMLRIAWSHAGTFDVATKIGGPFGTMRCPAELAHGAN |
| | | AGLDIAVRLLEPIKEQVPILSYADFYQLAGVVAVEITGGPEVPFHPGRQDKTEPPPEGRLPDATLGSDHLRQVFTAQMGLSDQDIVALSGG |
| | | HTLGRCHKERSGFEGAWTANPLIFDNSYFTELLTGEKEGLLQLPTDKTLLTDPAFRPLVDKYAADEDAFFADYAEAHLKLSELGFGEATEG |
| | | CC |
| 5 | M.682 | ......................KCYPTVSDEYLAAVAKARRKLRGLIAEKNCAPLMLRIAWSHAGTFDVATKIGGPFGTMRCPAELAHGAN |
| | | AGLDIAVRLLEPIKEQVPILSYADFYQLAGVVAVEITGGPEVPFHPGRQDKTEPPPEGRLPDATLGSDHLRQVFTAQMGLSDQDIVALSGG |
| | | HTLGRCHKERSGFEGAWTANPLIFDNSYFTELLTGEKEGLLQLPTDKTLLTDPAFRPLVDKYAADEDAFFADYAEAHLKLSELGFGEATEG |
| | | CC |
| 5 | M.421 | ......................KCYPTVSDEYLAAVAKARRKLRGLIAEKNCAPLMLRIAWSHAGTFDVATKIGGPFGTMRCPAELAHGAN |
| | | AGLDIAVRLLEPIKEQVPILSYADFYQLAGVVAVEITGGPEVPFHPGRQDKTEPPPEGRLPDATLGSDHLRQVFTAQMGLSDQDIVALSGG |
| | | HTLG |
| 5 | M.654 | .....................AKCYPTVSDEYLAAVAKARRKLRGLIAEKNCAPLMLRIAWSHAGTFDVATKIGGPFGTMRCPAELAHGAN |
| | | AGLDIAVRLLEPIKEQVPILSYADFYQLAGVVAVEITGGPEVPFHPGRQDKTEPPPEGRLPDATLGSDHLRQVFTAQMGLSDQDIVALSGG |
| | | HTLGRCHKERSGFEGAWTANPLIFDNSYFTELLTGEKEGLLQLPTDKTLLTDPAFRPLVDKYAADEDAFFADYAEAHLKLSELGFGEATEG |
| | | CC |
| 5 | M.393 | ...................................VAKARRKLRGLIAEKNCAPLMLRIAWSHAGTFDVATKIGGPFGTMRCPAELAHGAN |
| | | AGLDIAVRLLEPIKEQVPILSYADFYQLAGVVAVEITGGPEVPFHPGRQDKTEPPPEGRLPDATLGSDHLRQVFTAQMGLSDQDIVAL |
| 5 | M.669 | ...................................VAKARRKLRGLIAEKNCAPLMLRIAWSHAGTFDVATKIGGPFGTMRCPAELAHGAN |
| | | AGLDIAVRLLEPIKEQVPILSYADFYQLAGVVAVEITGGPEVPFHPGRQDKTEPPPEGRLPDATLGSDHLRQVFTAQMGLSDQDIVALSGG |
| | | HTLGRCHKERSGFEGAWTANPLIFDNSYFTELLTGEKEGLLQLPTDKTLLTDPAFRPLVDKYAADEDAFFADYAEAHLKLSELGFGEATEG |
| | | CC |
| 5 | M.625 | ...........AFPHPIGAMAAKCYPTVSDEYLAAVAKARRKLRGLIAEKNCAPLMLRIAWSHAGTFDVATKIGGPFGTMRCPAELAHGAN |
| | | AGLDIAVRLLEPIKEQVPILSYADFYQLAGVVAVEITGGPEVPFHPGRQDKTEPPPEGRLPDATLGSDHLRQVFTAQMGLSDQDIVALSGG |
| | | HTLGRCHKERSGFEGAWTANPLIFDNSYFTELLTGEKEGLLQLPTDKTLLTDPAFRPLVDKYAADEDAFFADYAEAHLKLSELGFGEATEG |
| | | CC |
| 5 | M.65S | HPDPQPHSSPTPAFPHPIGAMAAKCYPTVSDEYLAAVAKARRKLRGLIAEKNCAPLMLRIWSHAGTFDVATKIGGPFGTMRCPAELAHGAN |
| | | AGLDIAVRLLEPIKEQVPILSYADFYQLAGVVAVEITGGPEVPFHPGRQDKTEPPPEGRLPDATLGSDHLRQVFTAQMGLSDQDIVALSGG |
| | | HTLGRCHKERSGFEGAWTANPLIFDNSYFTELLTGEKEGLLQLPTDKTLLTDPAFRPLVDKYAADEDAFFADYAEAHLKLSELGFGEATEG |
| | | CC |
| 5 | M.524 | ........................................................................................... |
| | | .....................................GGPEVPFHPGRQDKTEPPPEGRLPDATLGSDHLRQVFTAQMGLSDQDIVALSGG |
| | | HTLGRCHKERSGFEGAWTANPLIFDNSYFTELLTGEKEGLLQLPTDKTLLTDPAFRPLVDKYAADEDAFFADYAEAHLKLSELGFGEATEG |
| | | CC |
| 6 | M.570 | ....................................AGLPQISDNEKSGFISLVSRYLSGEEEHTEWPKIHTPTDEVVVPYDTIDAPPEDL |
| | | EATKALLDKLAVLNLNGGLGTTMGCTGPKSVIEVRNGFTFLDLIVLQIESLNKKYGSNVPLLLMNSFNTHEDTIKIVEKYANSSIDIHTFN |
| | | QSQYPRVVADEFLPWPEKGKTDRDGWYPPGRGDIFPSLMNSGKLDLLLSQGKEYVEIANSDNLGAIVDMRILNRLIHRQNEYCMEVTPKTL |
| | | ADVKGSTLISYEGRVQLLEIAQVPDAHVDEFKSIEKFKIFNTNN |
| 6 | M.341 | ........................................................................................... |
| | | ........................................................................................... |
| | | ........................................................................................... |
| | | .................................................................EVDGVKVLQLETAAGAAIFF |
| | | DHAIGINVPRSRFLPVKATSDLQLVQSDLYTLVDGFVTRNSARTDPSNPSIELGPEFKKVGCFLGRFKSIPSIVELDSLKVSGDVWFGSGI |
| | | VLK |
| 6 | M.342 | ........................................................................................... |
| | | ........................................................................................... |
| | | ........................................................................................... |
| | | .....................................................................EVDGVKVLQLETAAGAAIRFF |
| | | DHAIGINVPRSRFLPVKATSDLQLVQSDLYTLVDGFVTRNSARTDPSNPSIELGPEFKKVGSFLGRFKSIPSIVELDSLKVSGDVWFGSGI |
| | | VLN |
| 6 | M.450 | ........................................................................................... |
| | | ........................................................................................... |
| | | .......................................................FIANSDNLGAIVDMKILNHLTHKQNEYCMEVTPKTL |
| | | ADVKGGTLISYEGRVQLLEIAQVPDAHVDEFKSIEKFKIFNTNNLWVNLKAIKRLVEADALKMEIIPNPKEVDGVKVLQLETAAGAAIRFF |
| | | DHAIGINVPRSRFLPVKATSDLQLVQSDLYTLVDGFVTRNSARTDPSNPSIELGPEFKK |
| 6 | M.343 | ........................................................................................... |
| | | ........................................................................................... |
| | | ........................................................................................... |
| | | ......................................................................EVDGVKVLQLETAAGAAIRFF |
| | | DHAIGINVPRSRFLPVKATSDLQLVQSDLYTLVDGFVTRNSARTDPSNPSIELGPEFKKVGSFLGRFKSIPSIVELDSLKVSGDVWFGSGI |
| | | VLK |
| 6 | M.639 | TLLFPHTQISLPSVRTRKHLAATMADEKLAKLREAVAGLPQISDNEKSGFISLVSRYLSGDEEHIEWPKIHTPIDEVVVPYDTIDAPPEDL |
| | | EATKALLNKLAVLKLNGGLGTTMGCTGPKSVIEVRNGFTFLDLIVLQIESLNKKYGSNVPLLLMNSFNTHEDTLKIVEKYANSSIDIHTFN |
| | | QSQYPRVVADEFLPWPSKGKTDKDGWYPPGRGDIFPSLMNSGKLDLLLSQGKEYVFIANSDNLGAIVDMKILNHLIHKQNEYCMEVTPKTL |
| | | ADVKGGTLISYEGRVQLLEIAQVPDAHVDEFKSIEKFKIFNTNNLWVNLKAIKRLVEADALKMEIIPNPKEVDTVNFF |
| 6 | M.555 | ................................................................................YDSVDAPPEDL |
| | | EATKALLNKLAVLKLNGGLGTTMGCTGPKSVIEVRNGFTFLDLIVLQIESLNKKYGSNVPLLLMNSFNTHEDTLKIVEKYANSSIDIHTFN |
| | | QSQYPRVVADEFLPWPSKGKTDKDGWYPPGRGDIFPSLMNSGKLDLLLSQGKEYVFIANSDNLGAIVDMKILNHLIHKQNEYCMEVTPKTL |
| | | ADVKGGTLISYEGRVQLLEIAQVPDAHVDEFKSIEKFKIFNTNNLWVNLKAIKRLVEADALKMEIIPNPKEVDTVNFF |
| 6 | M.546 | ........................................................................................EDL |
| | | EATKALLDKLAVLKLNGGLGTTMGCTGPKSVIEVRNGFTFLDLIVLQIESLNKKYGSNVPLLLMNSFNTHEDTLKIVEKYANSSIDIHTFN |
| | | QSQYPRVVADEFLPWPSKGKTDKDGWYPPGRGDIFPSLMNSGKLDLLLSQGKEYVFIANSDNLGAIVDMKILNHLIHKQNEYCMEVTPKTL |
| | | ADVKGGTLISYEGRVQLLEIAQVPDAHVDEFKSIEKFKIFNTNNLWVNLKAIKRLVEADALKMEIIPNPKEVDTVNFFRV |
| 7 | M.606 | ...................................................................................GKLRLVFE |
| | | GKDETVDLEVFNFTGAGGVALAMYNTDESIQGFAEASMAIAYEKKWPLYLSTKNTILKKYDGRFKDIFQAVYEADWNSKYEAAGIWYEHRL |
| | | IDDMVAYALKSEGGYVWACKNYDGDVQSDFLAQGFGSLGLMTSVLMCPDGKNIEAEAAHGTVTRHFRVHQKGGETSTNSIASIFAWTRGLA |
| | | HRAKLDDNARLLDFTQKLEDACVGTVESGKMTKDLALLVHGSSKVTRGDYLNTEEFIDAVAAELQSRLAAN |
| 7 | M.628 | ..........................................................................ATDAVLKGPGKLRLVFE |
| | | GKDETVDLEVFNFTGAGGVALAMYNTDESIQGFAEASMAIAYEKKWPLYLSTKNTILKKYDGRFKDIFQAVYEADWNSKYEAAGIWYEHRL |
| | | IDDMVAYALKSEGGYVWACKNYDGDVQSDFLAQGFGSLGLMTSVLMCPDGKNIEAEAAHGTVTRHFRVHQKGGETSTNSIASIFAWTRGLA |
| | | HRAKLDDNARLLDFTQKLEDACVGTVESGKMTKDLALLVHGSSKVTRGDYLNTEEFIDAVAAELQSRLAAN |
| 7 | M.248 | ........................................................................................... |
| | | .........................................................YPLFCRFNDIFQAVYEADWNSKYEAAGIWYEBRL |
| | | IDDMVAYALKSEGGYVWACKNYDGDVQSDFLAQGFGSLGLMTSVLMCPD |
| 7 | M.466 | ........................................................................................... |
| | | ........................................................................................... |
| | | ....................................................IEAEAAHGTVTRHFRVHQKGGETSTNSIASIFAWTRGLA |
| | | HRAKLDDNARLLDFIQKLEDACVGTVESGKMTNDLALLVHGSSKVTRGDYLNTEEFIDAVAAELQSRLAAN |
| 7 | M.328 | ........................................................................................... |
| | | ........................................................................................... |
| | | ...........................................................................STNSIASIFAWTRGLA |
| | | HRAKLDDNARLLDFTQKLEDACVGTVESGKMTKDLALLVHGSSKVTRGDYLNTEEFIDAVAAELQSRLAAN |
| 7 | M.695 | .............................PFSLCLLPSGTVFREPIICKNVPKLVPGWTKPICIGRHAFGDQYRATDAVLKGPGKLRLVFE |
| | | GKDETVDLEVFNFTGAGGVALAMYNIDESIQGFAEASMAIAYEKKWPLYLSTKNTILKKYDGRFKDIFQAVYEADWKSKYEAAGIWYEHRL |
| | | IDDMVAYALKSEGGYVWACKNYDGDVQSDFLAQGFGSLGLMTSVLMCPDGKTIEAEAAHGTVTRHFRVHQKGGETSTNSIASIFAWTRGLA |
| | | HRAKLDDNARLLDFTQKLEDACVGTVESGKMTKDLALLVHGSSKVTRGDYLNTEEFIDAVAAELQSRLAAN |
| 7 | M.658 | YNVAIKCATIIPDEDRVKEYNLKQMWEZPNGIIRNIINGTVFREFIICKNVPKLVPGWTKPICIGEAAFGDQYEATGAVLKGFGKLELVFE |
| | | GKDETVDLEVFNFTGAGGVALAMYNTDESIQGFAEASMAIAYEKKWPLYLSTKNTILKKYDGRFKDIFQAVYEADWKSKYEAAGIWYEHRL |
| | | IDDMVAYALKSEGGYVWACKNYDGDVQSDFLAQGFGSLGLMTSVLMCPDGKIIEAEAAHGIVTRHFRVHQKGGETSTNSIASIFAWTRGLA |
| | | HRAKLDDNARLLDFTQKLEDACVGTVESGKMTKDLALLVHGSSKVTRGDYLNTEEFIDAVAAELQSRLAAN |
| 7 | M.560 | ........................................................................................... |
| | | ..DETVDLEVFNFTGAGGVALAMYNTDESIQGFAEASMAIAYEKKWPLYLSTKNTILKKYDGRFKDIFQAVYEADWKSKYEAAGIWYEHRL |
| | | IDDMVAYALKSEGGYVWACKNYDGDVQSDFLAQGFGSLGLMTSVLMCPDGKIIEAEAAHGIVTRHFRVHQKGGETSTNSIASIFAWTRGLA |
| | | HRAKLDDNARLLDFTQKLEDACVGTVESGKMTKDLALLVHGSSKVTRGDYLNTEEFIDAVAAELQSRLAAN |
| 7 | M.548 | ........................................................................................... |
| | | ..DETVDLEVFNFTGAGGVALAMYNTDESIQGFAEASMAIAYEKKWPLYLSTKNTILKKYDGRFKDIFQAVYEADWKSKYEAAGIWYEHRL |
| | | IDDMVAYALKSEGGYVWACKNYDGDVQSDFLAQGFGSLGLMTSVLMCPDGKIIEAEAAHGIVTRHFRVHQKGGETSTNSIASIFAWTRGLA |
| | | HRAKLDDNARLLDFTQKLEDACVGTVESGKMTKDLALLVHGSSKVTRGDYLNTEEFIDAVAAELQSRLAAN |
| 7 | M.269 | ........................................................................................... |
| | | ........................................................................................... |
| | | ...........................................................................STNSIASIFAWTRGLA |
| | | HRAKLDDNARLLDFTQKLEDACVGTVESGKMTKDLALLVHGSSKVTRGDYLNTEEFIDAVAAELQSRLAANCV |
| 8 | M.728 | ........................................................................................... |
| | | ........................................ILVIFDGNFNTAGMLVVQSGCWTWLKGGATSFAAGKGELFFETNVTAELMV |
| | | DSMSLQPFSFEEWKSHRHESIAKERKKKVKITVHGSDGKVLPDAELSLERVAKGFPLGNAMTKEILDIPEYEKWFTSRFTVATMENEMKWY |
| | | STEYDQNQELYEIPDKMLALAEKYNISVRGHNVFWDDQSKQMDWVSKLSAPQLKKAMEKRMKNVVSRYAGKLIHWDVLNENLHYSFFEDKL |
| | | GKDASAEVFKEVAKLDDKPILFMNEYNTIEEPNDAAPLPTKYLAKLKQIQSYPGNSKLKYGIGLESHFDTPNIPYVRGSLDTLAQAKVPIW |
| | | LIEIDVKKGPKQVEYLEEVMREGFAHPGVKGIVLWGAWHAKECYVMCLTDKNFKNLPVGDVVDKLITEWKAVPEDAKTDDKGVFEAELFHS |
| | | ETNVTVKHHKSLKEPLMHIVDLDSKSEATIRAKK |
| 8 | M.653 | ........................................................................................... |
| | | ..............................................GNFNTAGMLVVQSGCWTWLKGGATSFAAGKGELFFETNVTAELMV |
| | | DSMSLQPFSFEEWKSHRHESIAKERKKKVKITVHGSDGKVLPDAELSLERVAKGFPLGNAMTKEILDIPEYEKWFTSRFTVATMENEMKWY |
| | | STEYDQNQELYEIPDKMLALAEKYNISVRGHNVFWDDQSKQMDWVSKLSAPQLKKAMEKRMKNVVSRYAGKLIHWDVLNENLHYSFFEDKL |
| | | GKDASAEVFKEVAKLDDKPILFMNEYNTIEEPNDAAPLPTKYLAKLKQIQSYPGNSKLKYGIGLESHFDTPNIPYVRGSLDTLAQAKVPIW |
| | | LIEIDVKKGPKQVEYLEEVMREGFAHPGVKGIVLWGAWHAKECYVM |
| 8 | M.759 | .....................................................YSANIECEEZPPKPLYGGGILTGREAPAPVSACCKKLLM |
| | | AKSKSAPAKGSTLKVELERDIHYTLSANLQLSKSTGDVKAILVTPDGNFNTAGMLVVQSGCNTMLKGGAISFAAGEGLFFETNVIAELVD |
| | | SMSLQPFSFEEWKSSHRHESIAKERKKEVKITVBGSDGRKVLPDAELSERVANGEFLGNAMTKEILDIPEYEKWFTSRITVATMENEMKWYS |
| | | TEYDQNQELYEIPDKMLALAEKYNISVRGHNVFWDDQSKQMDWVSKLSAPQLKKAMEKRMKNVVSRYAGKLIHMDVLNENLHYSFFEDKLG |
| | | KDASAEVFKEVAKLDDKPILFMNEYNIIEEPNDAAPLPIRYLAKLKQIQSYPGNSKLKYGIGLESHFDIPNIPYVRGSLDTLAQAKVPIWL |
| | | TEIDVKKGPNQVEYLEEVMREHFAHPGVKGIVLWGAWHAKECYVMCLTDKNFKNLPVGDVVDRLITITWKAVPEDAKIDDKGVEAELFHGE |
| | | YNVIVKHKSLKEPLMIVDLDSKSEATIRAKK |
| 8 | M.765 | ...HTTIVASGIENMKIFTRTWVLLLVVLLFEGCLAKSTKDERSDKSATYDYSANIECEPPKPLYGGGILTGAPAPVSAGGKKLLM |
| | | AKSKSAPAKGSTLKVELERDIHYTLSANLQLSKSTGDVKAILVTPDGNFNTAGMLVVQSGCNTMLKGGAISFAAGEGLFFETNVIAELVD |
| | | SMSLQPFSFEEWKSSHRHESIAKERKKEVKITVBGSDGRKVLPDAELSERVANGEFLGNAMTKEILDIPEYEKWFTSRITVATMENEMKWYS |
| | | TEYDQNQELYEIPDKMLALAEKYNISVRGHNVFWDDQSKQMDWVSKLSAPQLKKAMEKRMKNVVSRYAGKLIHMDVLNENLHYSFFEDKLG |
| | | KDASAEVFKEVAKLDDKPILFMNEYNIIEEPNDAAPLPIRYLAKLKQIQSYPGNSKLKYGIGLESHFDIPNIPYVRGSLDTLAQAKVPIWL |
| | | TEIDVKKGPNQVEYLEEVMREHFAHPGVKGIVLWGAWHAKECYVMCLTDKNFKNLPVGDVVDRLITITWKAVPEDAKIDDKGVEAELFHGE |
| | | YNVIVKHKSLKEPLMIVDLDSKSEATIRAKK |
| 8 | M.747 | ........................................................................................... |
| | | .....................................................................................LMV |
| | | DEMALQPFSFEEWKSHRRESIAKERKEKVRTIVHGBDGKVLFDAELSLERVAKGTPLGNAMIKEILDIPEYEKNFISRFIVATMENEMKWY |
| | | STEYLQMQELYEIPDKMLALAEKYSISVRGHMVFWDDQSSQMAVSKLSARQLKKAMERMKNVVSRTAGELIHWDVLMENLHTSFFEDKL |
| | | GNDAZAEVERRVAKLDDKPILFMNEYNTIEEPNDAAPLPTKILAKLKQIQSYPGNERLEYGTGLESHFDTPNIPTVRGSLDTLAQAKVPIN |
| | | LIEIDVKKGPPQVEYLEZVMREGFAINPGVTGIVLMGANHAKECYVMCLIDKNFNNLPVGDVVDKLITEWKAVPEDAKIDDKGVEAELFHG |
| | | ETNVTVKHHKSLKEPLMHIVDLDEKSEATIRAKR |
| 8 | M.763 | ALTHTTIVASGIENMKIPIRTWVLLLVVLLFEGCLAKSYKSERSDKSATYDYSANIECEKEPPKPLYGGGILTGAEAPAPVSAGGKKLLM |
| | | AKSKSAPAKGSTLKVELEKDTHYTLSAWLQLSKSTGDVKAILVTPDGNFNTAGMLVVQSGCWTMLKGGATSFAAGKGLELFETNVIAELMV |
| | | DSMSLQPESFEEWKSSHRHESIAKERKKKVRITVHGSDGKVLPDAELSLERVAKGEPLGNAMTKEILDIPEYEKWFISRFIVATMENEMKWY |
| | | STEYDQNQELYEIPDKMLALAEKYNISVRGHNVFWDDQSKQMDWVSKLSAPQLKKAMEKRMKNVVSRYAGKLIHWDVLNENLHYSFFEDKL |
| | | GKDASAEVFKEVAKLDDKPILFMNEYNTIEEPNDAAPLPIKYLAKLKQIQSYPGNSKLKYGIGLESHFDTPNIPYVRGSLDTLAQAKVPIW |
| | | LTEIDVKKGPKQVEYLEEVMREGFAHPGVKGIVLWGAWHAKECYVMCLTDKNFKNLPVGDVVDKLIIEWKAVPEDALIDDNGVFEAELFHG |
| | | EYNVIVKHKSLKEPLMHTVDLDSKSEATIRAKK |
| 8 | M.733 | ........................................................................................... |
| | | ..SKSAPAKGSILKVELERDTHYTLSANLCLLSKSTGDVKAILVTPDGNFNTAGMLVVQEGCNTMLKCCATSFAAGKGELFETNVIAELMV |
| | | DSMALQPFSFERWLSHREEKKKEVTKIIVHGSDGKVLPDAELSLERVAKGTPLGNAMTREILDIPEYEKNFISRFIVATMENEMKWY |
| | | STEYDQMQELYEIPDKMLALAEKYSISVRGHMVFWDDQSSQMAVSKLSARQLKKAMERMKNVVSRYAGKLIHWDVLNENLHYSFEEDML |
| | | GKDASAEVFKEVAKLDDKPILFMNEYNTIEEPNDAAPLPIKYLAKLKQIQSYPGNSKLKYGIGLESHFDTPNIPYVRGSLDTLAQAKVPIW |
| | | LTEIDVKKGPKQVEYLEEVMREGFAHPGVKGIVLWGAWHAKECYVMCLTDKNFKNLPVGDVVDKLIIEWKAVPEDALIDDNGVFEAELFHG |
| | | EYNVIVKHKSLKEPLMHTVDLDSKSEATIRAKK |
| 9 | M.651 | ........................................................................................... |
| | | ........................................................................................... |
| | | ........................................................................................... |
| | | .....VSADKTAKVWDIMEDASGKVNRILVCIGGVDDMLVGCWQNDHLVIVSLGGTFNVFSASNPDKEPVSFAGHLKTVSSLIYFPQS |
| | | NPRIMLSTSYDGVIIRWIQGVGYGGRLIRKNNTQIKCFVAAEEELITSGYDNMVFRIPLNGDQCGDAEEVDVGCQPNALNIAVQQPEFALI |
| | | TIDSAIVLLHKSIVISIIRVEYTIISSAVSPLGTEAIVGAQDGKLRIYSISGDILTEEAVLERHRGAITSIHYSPDVSMFASADANREAAVA |
| | | WDRATREIKLKNMLFHTARINCLAWSPDSRLVATGSIDICAITYDVDKPASSRITIKGAHLGGVHGLTFADNDILVTAGEDACVRVNKLVVP |
| 9 | M.677 | ........................................................................................... |
| | | ........................................................................................... |
| | | ........................................................................................... |
| | | ..VLTVSADKTAKYWDIMEDASGKVNRTLNVCTGIGGVDDMLVGCLWQNDHLVTVELGGTFNVFSASNPDKEPVSFAGHLKTVSALTYFPQS |
| | | NPRIMLSTSYDGVIIRWIQGVGYGGRLIRKNNTQIKCFVAAEEELITSGYDNMVFRIPLNGDQCGDAEEVDVGCQPNALNIAVQQPEFALI |
| | | TIDSAIVLLHKSIVISIIRVEYTIISSAVSPLGTEAIVGAQDGKLRIYSISGDILTEEAVLERHRGAITSIHYSPDVSMFASADANREAAVA |
| | | WDRATREIKLKNMLFHTARINCLAWSPDSRLVATGSIDICAITYDVDKPASSRITIKGAHLGGVHGLTFADNDILVTAGEDACVRVNKLVV |
| | | PQ |
| 9 | M.597 | ........................................................................................... |
| | | ........................................................................................... |
| | | ........................................................................................... |
| | | ...LTVSADKTAKYWDIMEDASGKVNRTLNVCTGIGGVDDMLVGCLWQNDHLVTVELGGIFNVFSASNPDKEPVSFAGHLKTVSSLTYFPQS |
| | | NPRIMLSTSYDGVIIRWIQGVGYGGRLIRKNNTQIKCFVAAEEELITSGYDNMVFRIPLNGDQCGDAEEVDVGCQPNALNIAVQQPEFALI |
| | | TIDSAIVLLHKSIVISTIRVEYTITSSAVSPDGTEAIVGAQDGKLRIYSISGDILTEEAVLERHRGAITSIHYSPDVSMFASADANREAAVA |
| | | WDRATREIKLKNMLFHTARINCLAWSPDSRLVATGSIDICAI |
| 9 | M.547 | ................PGGRRERRRPCMNQLQETYTACSPATERGERGILLGGGDAKIDIIVTCAGRIFTFRRLDAPLLANTYIEAYPTIVA |
| | | RISPNGEWVASADVSGVRVNGRHGDRALKAEFEPISGRVDDLRWSPDGLRIVVSGDGKGKSIVRAEMDSGSIVGDTDGHSKRVLSCDFR |
| | | PTRSFRIVICGEDYLASTYEGPPTKFRHSIRDNAWNCINTSPLGZKFFITYGSDKKGLTYDCKTGDETCELSSEDSSICSTYANNADS |
| | | KQVLIVSAD |
| 9 | M.761 | ............TLPDQSEEGERRRPKMAQLQEIYACSPATERGRGILLGGDAKIDIIVYCAGRTFFFRRLDAPLDAWTYTEHAYPITVA |
| | | RISPNGEWVASADVSGVRVNGRHGDRALKAEFEPISGRVDDLRWSPDGLRIVVSGDGKGKSIVRAFMDSGSIVGDTDGHSKRVLSCDFR |
| | | PIRSFRIVICGEDFLANYYEGPPTKFRHSIRDNAVNCIRYSPDGSKFITSSDKKGLTYDCKTGDETCELSSEDSHTGSTYAVSWSADS |
| | | KQVLIVSADKTAKVWDIMEDASGKVNRILVCIGIGGVDDMLVGCLWQNDHLVTVSLGGIFNVFSASNPDKEPVSFAGHLKTVSSLTYFPQS |
| | | NPRIMLSTSYDGVIIRWIQGVGYGGRLIRKKNNTQIKCFVAAEEELITSGYDNMVFRIPLNGDQCGDAESVDVGGQONALNIVQQPEFALI |
| | | TTDSAIVLLHKSIVISTIRVEYTITSSAVSPDGTEAIVGAQDGKLRIYSISGDILTEEAVLERHRGAITSIHYSPDVSMFASADANREAAVA |
| | | WDRATREIKLKNMLFHTARINCLAWSPDSRLVATGSIDICAIIYDVDKPASSRIIIKGILGGVHGLTFADNDILVTAGEDACVRVM |
| 9 | M.571 | GITTLHSPIRGPILPDQSEEGERRRPQMNQLQETYACSPATERGRGILLGGDAKIDTIVYCAGRVFFRELDAPLDANTYIEIAYPTTVA |
| | | RISPNGEWVASADVSGCVRVWGNNGDRALFAEFRPTSGRVDDLAMSPDGLEIYYSDGNGKSLVRAPMDSGSIVGLFDGHIKRVLSCDFE |
| | | PTRSFRIVICGFDYLASTYEGPPTKFRHSIRDNAWNCINTSPLGZKFFITYGSDKKGLTYDCKTGDETCELSSEDSSICSTYAVSNSADS |
| | | KQVLTVSAD |
| 9 | M.582 | GITTLHSPIRGPILPDQSEEGERRRPQMNQLQETYACSPATERGRGILLGGDAKIDTIVYCAGRVFFRELDAPLDANTYIEIAYPTTVA |
| | | RISPNGEWVASADVSGCVRVWGNNGDRALFAEFRPTSGRVDDLAMSPDGLEIYYSDGNGKSLVRAPMDSGSIVGLFDGHIKRVLSCDFR |
| | | PTRSFRIVICGFDYLASTYEGPPTKFRHSIRDNAWNCINTSPLGZKFFITYGSDKKGLTYDCKTGDETCELSSEDSSICSTYAVSNSADS |
| | | KQ |
| 9 | M.657 | ........................................................................................... |
| | | ........................................................................................... |
| | | .....................................................................................SWSADS |
| | | KQVLTVSADKTAKVWDIMEDASGKVNRILVCIGIGGVDDMLVGCLWQNDHLVTVSLGGIFNVFSASNPDKEPVSFAGHLKTVSSLTYFPQS |
| | | NPRIMLSTSYDGVIIRWIQGVGYGGRLIRKKNNTQIKCFVAAEEELITSGYDNMVFRIPLNGDQCGDAESVDVGGQONALNIVQQPEFALI |
| | | TTDSAIVLLHKSIVISTIRVEYTITSSAVSPDGTEAIVGAQDGKLRIYSISGDILTEEAVLERHRGAITSIHYSPDVSMFASADANREAAVA |
| | | WDRATREIKLKNMLFHTARINCLAWSPDSRLVATGSIDICAIIYDVDKPASSRIIIKGILGGVHGLTFADNDILVTAGEDACVRVW |
| 9 | M.738 | ........................................................................................... |
| | | ..................................SSAPWAAVVIQKFILSCSFIFGIQSYAKFSEMCRWDSGDIVGDFDGHSKRVLSCDFK |
| | | PIRSFRIVICGEDFLANYYEGPPTKFRHSIRDNAVNCIRYSPDGSKFITSSDKKGLTYDCKTGDETCELSSEDSHTGSTYAVSWSADS |
| | | KQVLIVSADKTAKVWDIMEDASGKVNRILVCIGIGGVDDMLVGCLWQNDHLVTVSLGGIFNVFSASNPDKEPVSFAGHLKTVSSLTYFPQS |
| | | NPRIMLSTSYDGVIIRWIQGVGYGGRLIRKNNTQIKCFVAAEEELITSGYDNMVFRIPLNGDQCGDAESVDVGGQONALNIVQQPEFALI |
| | | TTDSAIVLLHKSIVISTIRVEYTITSSAVSPDGTEAIVGAQDGKLRIYSISGDILTEEAVLERHRGAITSIHYSPDVSMFASADANREAAVA |
| | | WDRATREIKLKNMLFHTARINCLAWSPDSRLVATGSIDICAIIYDVDKPASSRITIKGILGGVHGLTFADNDILVTAGEDACVRVWKLVVP |
| 9 | M.734 | ........................................................................................... |
| | | .................................GSSAPWAAVVIQKFILSCSFIFGIQSYAKFSEMCRWDSGDIVGDFDGHSKRVLSCDFK |
| | | PIRSFRIVICGEDFLANYYEGPPTKFRHSIRDNAVNCIRYSPDGSKFITSSDKKGLTYDCKTGDETCELSSEDSHTGSTYAVSWSADS |
| | | KQVLIVSADKTAKVWDIMEDASGKVNRILVCIGIGGVDDMLVGCLWQNDHLVTVSLGGIFNVFSASNPDKEPVSFAGHLKTVSSLTYFPQS |
| | | NPRIMLSTSYDGVIIRWIQGVGYGGRLIRKNNTQIKCFVAAEEELITSGYDNMVFRIPLNGDQCGDAESVDVGGQONALNIVQQPEFALI |
| | | TTDSAIVLLHKSIVISTIRVEYTITSSAVSPDGTEAIVGAQDGKLRIYSISGDILTEEAVLERHRGAITSIHYSPDVSMFASADANREAAVA |
| | | WDRATREIKLKNMLFHTARINCLAWSPDSRLVATGSIDICAIIYDVDKPASSRITIKGILGGVHGLTFADNDILVTAGEDACVRVW |
| 9 | M.621 | ........................................................................................... |
| | | ........................................................................................... |
| | | ........................................................................................... |
| | | ..............................CTGUGGVDDMLVGCLWQNDHLVTVSLGGTFNVFSASNPDKEPVSFAGHLKTVSSLTYFPQS |
| | | NPRTMLSYSYDGVTIRWIQGVGYGGRLIRKNNTQIKCFVAAEEELITSGYDNMVFRIPLNGDQCGDAESVDVGGQPNALNIAVQQPEFALI |
| | | TTDSAIVLLRKSTVISTTKVEYITSSAVSPDGTEAIVGAQCGKLRIYSISGOTLIEEAVLERNRGAITSIHYSPDVSMFASACANREAVA |
| | | MDRATREIKLKNMLFHTARINCLAMSPDSRLVAIGSIDICAIVYDVDKPASSRITIKGAHLGGVHGLTFADNDILVIAGEDACVRVWKLVV |
| | | P |
| 9 | M.741 | ........................................................................................... |
| | | ........................................................................................... |
| | | ................CVRVWGRNGURALEFTPISGKVDDLRWSPGGLRVVSGDGKGKSLVKAPMMDSGETVGDFDGHISKRVLSCDFK |
| | | PTRFFRIVTCGEDFLANYYEGAPPKFHSIRDHENFVNCIRYSPDGSRTITTVSSDKRGLIYDGFTGDKIGELSEDSHTGSIYAVSNEADS |
| | | NPRIMLSTSYDGVTIRWIQGVGYGGRLIRKNNTQIKCFVAAEEELITSGYDNMVFRIPLNGDQCGDAESVDVGGQPNALNIAVQQPEFALI |
| | | MDRATREIKLKNMLFHTARINCLAMSPDSRLVAIGSIDICAIVYDVDKPASSRITIKGAHLGGVHGLTFADNDILVIAGEDACVRVWKLVV |
| | | P |
| 10 | M.177 | GATIVVSGDGRYFSKDAVQITTKMAAANGVRRVWVGQDSLLSTPAVSAIIRERIAADGSKATGAFILTASH |
| 11 | M.579 | ......................RDQVGLLVKGASEMGASRIKLRDGRDVLDSSVGPVETLENDLADLREKCVDAQVASGGGRMYT |
| | | MDKYENDWDVVKRGWDAQVLDEAPYKSALEAVKILRAEPKANDQTLPAFVIVDKSGKSVGPIVDQDAVVTFNFRADRMVMLAKALFFAD |
| | | FDEEDRVRVPKIKYAGMLQYDGELKLPMFTLVSPPLTERISGEYLVKNGVRTFACELVRFGHVITTWMGNMLAKLPFAD |
| | | ITFNEQPKMKALEIREKIRGAILSGKFGQVRINLPN |
| 11 | M.513 | .ESFAEGTLHLIGLLSDGGVHSRLDQVQLLVKGASERGAKRIRLHILIDGRDVLDGSSVGFVETLENDLAGLPEKGVDAQVASGGGRMYVI |
| | | MDRYENDWDVVKRGWDAQVLGEAPYKKFKSALEAVKTLRAEPKANDQYLPAPVIVDESGKSVGPIVDGDAVVTFNFRADRMVMLAKALEFAD |
| | | FDKFDRVRVPKIKYAGMLQYDGELKLPNKFLVSPPLIERISGEYLVKNGVR |
| 11 | M.446 | ..................................................RDVLDGSSVGTVETLENDIAQLREKGVDAQVASGGGKMYVI |
| | | MDRYENDWDVVKRGWDAQVLGEAPYKKFKSALEAVKTLRAEPKANDQYLPAPVIVDESGKSVGPIVDGDAVVTFNFRADRMVMLAKALEFAD |
| | | FDKFDRVRVPKIKYAGMLQYDGELKLPNKFLVSPPLIERISGEYLVKNGVRI |
| 11 | M.388 | ........................................................................................... |
| | | ..................................................................DAVVIFNFRADRMVMLAKALEFAD |
| | | FDKFDRVRVPKIKYAGMLQYDGELKLPNKFLVSPPLIERISGEYLVKNGVRIFACSEIVKFGHVIFFWNGNRSGYFDEIKEEYIEIPSDSG |
| | | ITFNEQPKMKALEIAEKTRDAILSGKFDQVRINLP |
| 11 | M.391 | ........................................................................................... |
| | | ..................................................................DAVVIFNFRADRMVMLAKALEFAD |
| | | FDKFDRVRVPKIKYAGMLQYDGELKLPNKFLVSPPLIERISGEYLVKNGVRIFACSEIVKFGHVIFFWNGNRSGYFDEIKEEYIEIPSDSG |
| | | ITFNEQPKMKALEIAEKTRDAILSGKFDQVRINLPN |
| 11 | M.593 | .......ESENVKEFSTINLFLVSLYFQLLVKGASERGAKRIRLHILIDGRDVLDGSSVGFVEILENDLAQLREKGVDAQVASGGRMYVI |
| | | MDRYENDMDVVKRGWDAQVLGEAPYKFKSALEAVKTLRAEPKANDQYLPAFVIVDESGKSVGPIVDGDAVVTPNFRADRMVMLAKALEPAD |
| | | FDKFDRVRVPKIKYAGMLQYDGELKLPMKFLVSPPLIERISGEYLVKNGVRTFACSETVKFGHVIFFWNGNRSGYFDETKEEYIEIPSDSG |
| | | ITFNEQPKMKALEIAEKIRDAILSGKFDQVRINLPN |
| 11 | M.506 | ................................................................................VISGGGRMYVI |
| | | MDRYENDMDVVKRGWDAQVLGEAPYKFKSALEAVKTLRAEPKANDQYLPAFVIVDESGKSVGPIVDGDAVVTPNFRADRMVMLAKALEPAD |
| | | FDKFDRVRVPKIKYAGMLQYDGELKLPMKFLVSPPLIERISGEYLVKNGVRTFACSETVKFGHVIFFWNGNRSGYFDETKEEYIEIPSDSG |
| | | ITFNEQPKMKALEIAEKIRDAILSGKFDQVRINLPN |
| 11 | M.395 | .....................................................................................GRMYVT |
| | | MDRYENDWDVVKRGWDAQVLGEAPYKFKSALEAVKILRASPKANDQYLPAFVIVDESGKSVGPIVDGDAVYIFNFRADRMVMLAKALEFAD |
| | | FDMFDRVRVPKIKYAGMIQYDGELKLPNKFLVSPPLIERISGEYVKNGVRTFAC |
| 11 | M.381 | ........................................................................................... |
| | | ....................................................................DAVVTFNFKADHVNMLAKALFAC |
| | | FDKFDRVRVPKISTRAGGMLQGELMLPGKELTVSPPLIERISGEYENGVRIFACSETVRIGHYIEFMNGNRSGYTCEINECTIEIPSDSG |
| | | ITFNEQPRMKALEIAEKISDRILSGK |
| 11 | M.372 | KESFAEGILNLIGLLSDGGVHSRLDQVQLLVNGASERGASRIRLHILTDGRDVLDGSSVGIVEILENDLAQLREMGVDAQVARSGGGRMYVI |
| | | MDHYENDWDVVKNGNDAQVLGEAPYKFKSPLEAVEILRAEP |
| 12 | M.615 | CSSDYKLLCSSFPYITYHQGNNGNLSRLACPLNQKNK |
| 12 | M.656 | CSSDYKLLCSSFPYITYHQGNNGNLSRLACPLNQKNKKKS |
| 12 | M.525 | CSSDYKLLCSSFPYITYHQGNNGNLSRLACPLNQKNKKKS |
| 13 | M.698 | ....AMDEEYDVTVLGTGLKECILSGLLSVDGLKVLRMDSNDIYGGESISLNLTKIWKRFKGSEATPDHLGVSKEYNVDMVPKFMMANGAL |
| | | VRVLIRTSVIKYLNFKAVDGSFVYSNGKIHEVPAIDVEALKSNKNGKFEJROARKFFIYVQQYEEDPKSHEGLDLHKVITREVISKYGLE |
| | | DDIVDFIGHALALHADDNYLDEPAIDIVKFMKLYAESLARFQGGSPYIYPLYGLGELPQAFARLSAVTGGIYMLNKPECKVEPDESGKAFG |
| | | VISEGETAKCKKVVCDPSYLPDEVIKVGRVARAICIMKHPIPDIKDSHSVQIILPKKQLKRKSDMYVTCCSYAHNVAPKGKFIAFVSTEAE |
| | | IDKPEIELKPGIDLLGPVEEIFFDIYDRYEPANAPEEDNCTVINSYDATTH |
| 13 | M.699 | ....AMDEEYDVTVLGTGLKECILSGLLSVDGLKVLRMDSNDIYGGESISLNLTKIWKRFKGSEATPDHLGVSKEYNVDMVPKFMMANGAL |
| | | VRVLIRTSVIKYLNFKAVDGSFVYSNGKIHEVPAIDVEALKSNKNGKFEJROARKFFIYVQQYEEDPKSHEGLDLHKVITREVISKYGLE |
| | | DDIVDFIGHALALHADDNYLDEPAIDIVKFMKLYAESLARFQGGSPYIYPLYGLGELPQAFARLSAVTGGIYMLNKPECKVEPDESGKAFG |
| | | VISEGETAKCKKVVCDPSYLPDEVIKVGRVARAICIMKHPIPDIKDSHSVQIILPKKQLKRKSDMYVTCCSYAHNVAPKGKFIAFVSTEAE |
| | | TDKPEIELKPGIDLLGPVEEIFFDIYDRYEPANAPEEDNCTVINSYDATTH |
| 13 | M.439 | ........................................................................................... |
| | | ...............................................................................TTREVISKYGLE |
| | | DDIVDFIGHALALHRDDNYLDEPAIDIVKRMLYAESLASFQGGSPYIYPLYGLGELPQAFARLSAVYGGTYMLNKPECKVEFDESGKAFG |
| | | VTSEGETAKCKEVVCDPSYLPDKVIKVGKVARATCTMKRPIPDTKDSRSVQITLPKKQLKRKSDMYVTCCSY |
| 13 | M.630 | ....AMDEEYDVTVLGTGLKECILSGLLSVDGLKVLRMDSNDIYGGESISLNLTKIWKRFKGSEATPDHLGVSKEYNVDMVPKFMMANGAL |
| | | VRVLIRTSVIKYLNFKAVDGSFVYSNGKIHEVPAIDVEALKSNKNGKFEJROARKFFIYVQQYEEDPKSHEGLDLHKVITREVISKYGLE |
| | | DDIVDFIGHALALHADDNYLDEPAIDIVKFMKLYAESLARFQGGSPYIYPLYGLGELPQAFARLSAVTGGIYMLNKPECKVEPDESGKAFG |
| | | VISEGETAKCKKVVCDPSYLPDEVIKVGRVARAICIMKHPIPDIKDSHSVQIILPKKQLKRKSDMYVTCCSYA |
| 13 | M.708 | ..........................LLSVDGLKVLHMDRNDYYGGESISLNTKIWKSRFKGSEATPDHLGVSKLYNVDMVTFFMMANGAL |
| | | VRVLIRTSVIKYLNFKAVDGSFVYSNGKIHEVPAIDVEALKSNKNGKFEJROARKFFIYVQQYEEDPKSHEGLDLHKVITREVISKYGLE |
| | | DDIVDFIGHALALHADDNYLDEPAIDIVKFMKLYAESLARFQGGSPYIYPLYGLGELPQAFARLSAVTGGIYMLNKPECKVEPDESGKAFG |
| | | VISEGETAKCKKVVCDPSYLPDEVIKVGRVARAICIMKHPIPDIKDSHSVQIILPKKQLKRKSDMYVTCCSYAHNVAPKGKFIAFVSTEAE |
| | | TDKPEIELKPGIDLLGPVEEIFFDIYDRYEPANAPEEDNCTVINSYDATTHFETTVKDVLALYSKIIGKELDLSVDLNAASAGESEAA |
| 13 | M.620 | .....MDEEYDVTVLGTGLKECILSGLLSVDGLKVLRMDSNDIYGGESISLNLTKIWKRFKGSEATPDHLGVSKEYNVDMVPKFMMANGAL |
| | | VRVLIRTSVIKYLNFKAVDGSFVYSNGKIHEVPAIDVEALKSNKNGKFEJROARKFFIYVQQYEEDPKSHEGLDLHKVITREVISKYGLE |
| | | DDIVDFIGHALALHADDNYLDEPAIDIVKFMKLYAESLARFQGGSPYIYPLYGLGELPQAFARLSAVTGGIYMLNKPECKVEPDESGKAFG |
| | | VISEGETAKCKKVVCDPSYLPDEVIKVGRVARAICIMKHPIPDIKDSHSVQIILPKKQ |
| 14 | M.758 | LIGYLLNVVAIRRPPPVRCFSLRAW |
| 14 | M.764 | LIGYLLNVVAIRRPPPVRCFSLRAW |
| 14 | M.746 | LIGYLLNVVAIRRPPPVRCFSLRAW |
| 14 | M.762 | LIGYLLNVVAIRRPPPVRCFSLRAW |
| 15 | M.716 | PRVNFFKRYNLICVFW |
| 15 | M.726 | PRVNFFKRYNLICVFWSKKKFRAW |
| 16 | MN.66 | RSDEKLLSVFPEGVVYGAGIGPGYYGTNSFRIPSKEEIACDEALFPKTRPPPKPPRTLQKQIDSLCPGFCLKDVIPETYRIEER |
| 17 | M.717 | NYCIRLSPFCCLYCILCCNYSMRLVTVM |
| 17 | M.727 | NYCIRLSPFCCLYCILCCNYSMRLVTVM |
| 17 | M.719 | NYCIRLSPFCCLYCILCCNYSMRLVTVM |
| 17 | M.724 | NYCIRLSPFCCLYCILCCNYSMRLVTVM |
| 17 | M.577 | NYCIRLSPFCCLYCILCCNYSMRLVTVM |
| 18 | M.8 | NIPATWGAMEKLYDAGKARAIGVSWLASKKLGDLLAVARIPPA |
| 19 | M.235 | DVNHATVKTSSGEKPVRELVQDDEWLNGPFIATVQQRGAAIIKARKLSSALSAASSACDHIRDWVLGTPEGTFVSMGVYSD |
| 20 | M.678 | LKTEESRPSPKPNRIERRKREEHAPPPGQHIAMAASSRRASQLLGSAASRFLHSRGYAAAAAAPSPAVFVDKSTRVICQGITGKNGTFHTE |
| | | QAIEYGTNMVGGVTPKKGGTEHLGLPVFNSVAEAKAETKANASVIYVPPPFAAAAIMEALEAELDLVVCITEGIPQHDMVKVKAALNRQSK |
| | | TRLIGPNCPGIIKPGECKIGIMPGYIHKPGRIGIVSRSGTLTYEAVFQTTAVGLGQSTCVGMGGDPFNGTNFVDCLEKFVADPQTEGIVLI |
| | | GEIGGTAEEDAAAFIQASKTDKPVVAFIAGLTAPPGRRMGHAGAIVSGGKGTAQDKIKALREAGVTVVESPAKIGSTMFEIFKQRGMVE |
| 20 | M.675 | .....SRPSPKPNRIERRKREEHAPPPGQHIAMAASSRRASQLLGSAASRFLHSRGYAAAAAAPSPAVFVDKSTRVICQGITGKNGTFHTE |
| | | QAIEYGTNMVGGVTPKKGGTEHLGLPVFNSVAEAKAETKANASVIYVPPPFAAAAIMEALEAELDLVVCITEGIPQHDMVKVKAALNRQSK |
| | | TRLIGPNCPGIIKPGECKIGIMPGYIHKPGRIGIVSRSGTLTYEAVFQTTAVGLGQSTCVGMGGDPFNGTNFVDCLEKFVADPQTEGIVLI |
| | | GEIGGTAEEDAAAFIQASKTDKPVVAFIAGLTAPPGRRMGHAGAIVSGGKGTAQDKIKALREAGVTVVESPAKIGSTMFEIFKQRGMVE |
| 20 | M.641 | ............................................................AAAPSPAVFVDKSTRVICQGITGKNGTFHTE |
| | | QAIEYGTNMVGGVTPKKGGTEHLGLPVFNSVAEAKAETKANASVIYVPPPFAAAAIMEALEAELDLVVCITEGIPQHDMVKVKAALNRQSK |
| | | TRLIGPNCPGIIKPGECKIGIMPGYIHKPGRIGIVSRSGTLTYEAVFQTTAVGLGQSTCVGMGGDPFNGTNFVDCLEKFVADPQTEGIVLI |
| | | GEIGGTAEEDAAAFIQASKTDKPVVAFIAGLTAPPGRRMGHAGAIVSGGKGTAQDKIKALREAGVTVVESPAKIGSTMFEIFKQRGMVE |
| 20 | M.499 | ........................................................................................... |
| | | ........................................................................................... |
| | | .....................MPGYIHKPGRIGIVSRSGTLTYEAVFQTTAVGLGQSTCVGMGGDPFNGTNFVDCLEKFVADPQTEGIVLI |
| | | GEIGGTAEEDAAAFIQASKTDKPVVAFIAGLTAPPGRRMGHAGAIVSGGKGTAQDKIKALREAGVTVVESPAKIGSTMFEIFKQRGMVE |
| 20 | M.583 | ........................................................................................... |
| | | .......QQVGGVTPKKGGTEHLGLPVFNSVAEAKAETKANASVIYVPPPFAAAAIMEALEAELDLVVCITEGIPQHDMVKVKAALNRQSK |
| | | TRLIGPNCPGIIKPGECKIGIMPGYIHKPGRIGIVSRSGTLTYEAVFQTTAVGLGQSTCVGMGGDPFNGTNFVDCLEKFVADPQTEGIVLI |
| | | GEIGGTAEEDAAAFIQASKTDKPVVAFIAGLTAPPGRRMGHAGAIVSGGKGTAQDKIKALREAGVTVVESPAKIGSTMFEIFKQRGMVE |
| 20 | M.649 | ........................................................................................... |
| | | EVLTSKRQQVGGVTPKKGGTEHLGLPVFNSVAEAKAETKANASVIYVPPPFAAAAIMEALEAELDLVVCITEGIPQHDMVKVKAALNRQSK |
| | | TRLIGPNCPGIIKPGECKIGIMPGYIHKPGRIGIVSRSGTLTYEAVFQTTAVGLGQSTCVGMGGDPFNGTNFVDCLEKFVADPQTEGIVLI |
| | | GEIGGTAEEDAAAFIQASKTDKPVVAFIAGLTAPPGRRMGHAGAIVSGGKGTAQDKIKALREAGVTVVESPAKIGSTMFEIFKQRGMVE |
| 21 | M.6 | ........................................................................................... |
| | | ............LRVQSDQAVFYQCYFDGYQDTLYTHAQRQFFRDCTVIGTIDFI |
| 21 | M.29 | DGSGDFKIIKEALAKVPPKSASMYVMYIKEGTYKEYVIVPRIVINLVMIGDG |
| 21 | M.34 | ........................................................................................... |
| | | ..........VALRVQSDQAVFYQCYFDGYQDTLYTHAQRQFFRDCTVIGTIDFIFWITIWEL |
| 21 | M.183 | ....................................................................................MKDIRVE |
| | | NTAGADNHQAVALRVQSDQAVFYQCYFDGYQDTLYTHAQRQFFRDCTVTGTIDFIFGNSQVVIQN |
| 21 | M.101 | ....................................................................................MKDIRVE |
| | | NTAGADNHQAVALRVQSDQAVFYQCYFDGYQDTLYTHAQRQFFRDCTVTGTIDFIF |
| 21 | M.149 | ................LAKVPPKSASMYVMYIKEGTYKEYVTVPRTVTNLVMIGDGAAKTIITGNKNFKMNLISMVAVS |
| 21 | M.164 | .................LAKVPPKSASMYVMYIKEGTYKEYVTVPRTVTNLVMIGDGAAKTIITGNKNFKMNLI |
| 21 | M.129 | ................LAKVPPKSASMYVMYIKEGTYKEYVTVPRTVTNLVMIGDGAAKTIITGNKNFKMNLI |
| 21 | M.45 | .......................................................................DTATMEAIGNGFEMKDIRVE |
| | | NTAGADNHQAVALRVQSDQAVFYQCYFDGAVTEEL |
| 21 | M.116 | .................LAKVPPKSASMYVMYIKEGTYKEYVTVPRTVTNLVMIGDGAAKTIITGNKNFKMNLIIKD |
| 21 | M.165 | .....................................................................TKDTATMEAIGNGFFMKDIRVE |
| | | NTAGADNHQAVALRVQSDQAVFYQCYFDGYQDTLYTHAQRQFFRDCTV |
| 21 | M.146 | .......................................................................DTATMEAIGNGFFMKDIRVE |
| | | NTAGADNHQAVALRVQSDQAVFYQCYFDGYQDTLYTHAQRQFFRDCTV |
| 21 | M.69 | ............................................................................EAIGNGFFMKDIRVE |
| | | NTAGADNHQAVALRVQSDQAVFYQCYFDGYQDTLYTLMSFMKNP |
| 21 | M.123 | .............AKVPPKSASMYVMYIKEGTYKEYVTVPRTVTNLVMIGDGAAKTIITGNKNFKMNLISKVAVSLV |
| 21 | M.107 | ..............AKVPPKSASMYVMYIKEGTYKEYVTVPRTVTNLVMIGDGAAKTIITGNKNFKMNLTIKDTATM |
| 21 | M.3 | ..................KSASMYVMYIKEGTYKEYVTVPRTVTNLVMIGDGATKTIIT |
| 21 | M.113 | ...............VPPKSASMYVMYIKEGTYKEYVTVPRTVTNLVMIGDGAAKTIITGNKNFKMNL |
| 21 | M.204 | .......................................................................DTATMEAIGNGFEMKDIRVE |
| | | NTAGADNHQAVALRVQSDQAVFYQCYFDGYQDTLYTHAQRQFFRDCTVTGTIDEI |
| 21 | M.174 | ...................SASMYVMYIKEGTYKEYVTVPRTVTNLVMIGDGAAKTIITGNKNFKMNLTTKDTATMEAIGNGFFMKDIRV |
| 21 | M.178 | ..GSGDFKTIKEALAKVPPKSASMYVMYIKEGTYKEYVTVPRTVTNLVMIGDGAAKTIILKFLLPVMIVLAAP |
| 21 | M.191 | .GSGDFKTIKEALAKVPPKSASMYVMYIKEGTYKEYVTVPRTVTNLVMIGDGAAKTIITGNKNFKMNLTTKDTA |
| 22 | M.580 | .......................................PALVPMALPNQGTVDYPSFKLVIVGDGGTGKTTFVKRHLTGEFEKKYEPTIG |
| | | VEVHPLDFTTNCGKIRFYCWDTAGQEKFGGLRDGYYIHGQCAIIMFDVTSRLTYKNVPTWHRDLCRVCENIPIVLCGNKVDVKNRQVKAKQ |
| | | VTFHRKKNLQYYEISAKSNYNFEKPFLYLARKLAGDANIHFVEAVALKPPEVTFDLAMQQQHEAELAAAAAQPLPDDDDDLVE |
| 22 | M587 | ...........................PAPPPTQHLPSPPALVPMALPNQGTVDYPSFKLVIVGDGGTGKTTFVKRHLTGEFEKKYEPTIG |
| | | VEVHPLDFTTNCGKIRFYCWDTAGQEKFGGLRDGYYIHGQCAIIMFDVTSRLTYKNVPTWHRDLCRVCENIPIVLCGNKVDVKNRQVKAKQ |
| | | VTFHRKKNLQYYEISAKSNYNFEKPFLYLARKLAGDANIHFVEAVALKPPEVTFDLAMQQQHEAELAAAAAQPLPDDDDDLVE |
| 22 | M.594 | ...................VLLLRRTPPRSSSYPTVASPPALVPMALPNQGTVDYPSFKLVIVGDGGTGKITFVKEHLTGEFEKKYEPTIG |
| | | VEVHPLDFTTNCGKIRFYCWDTAGQEKFGGLRDGYYIHGQCAIIMFDVTSRLTYKNVPTWHRDLCRVCENIPIVLCGNKVDVKNRQVKAKQ |
| | | VTFHRKKNLQYYEISAKSNYNFEKPFLYLARKLAGDANIHFVEAVALKPPEVTFDLAMQQQHEAELAAAAAQPLPDDDDDLVE |
| 22 | M.539 | ............................APPPTQQQPSPPALVPMALPNQGTVDYPSFKLVIVGDGGTGKITFVKRHLTGEFEKKYEPTIG |
| | | VEVHPLDFTTNCGKIRFYCWDTAGQEKFGGLRDGYYIHGQCAIIMFDVTSRLTYKNVPTWHRDLCRVCENIPIVLCGNKVDVKNRQVKAKQ |
| | | VTFHRKKNLQYYEISAKSNYNFEKPFLYLARKLAGDANIHFVEAVALKPPEVTFDLAMQQQHEAELAAAAAQPLPDDDDDLVE |
| 22 | M.569 | ...................................MPSPPALVPMALPNQGTVDYPSFKLVIVGDGGTGKITFVKRHLTGEFEKKYEPTIG |
| | | VEVHPLDFTTNCGKIRFYCWDTAGQEKFGGLRDGYYIHGQCAIIMFDVTSRLTYKNVPTWHRDLCRVCENIPIVLCGNKVDVKNRQVKAKQ |
| | | VTFHRKKNLQYYEISAKSNYNFEKPFLYLARKLAGDANIHFVEAVALKPPEVTFDLAMQQQHEAELAAAAAQPLPDDDDDLVE |
| 22 | M.588 | ..........................PPAPPPTQQQPSPPALVPMALPNQGTVDYPSFKLVIVGDGGTGKTTFVKRHLTGEFEKKYEPTIG |
| | | VEVHPLDFTTNCGKIRFYCWDTAGQEKFGGLRDGYYIHGQCAIIMFDVTSRLTYKNVPTWHRDLCRVCENIPIVLCGNKVDVKNRQVKAKQ |
| | | VTFHRKKNLQYYEISAKSNYNFEKPFLYLARKLAGDANIHFVEAVALKPPEVTFDLAMQQQHEAELAAAAAQPLPDDDDDLVE |
| 22 | M.615 | APISASTGSPNSDSNIRVLLLRRTSPESAPPPTQQLPSPPALVPMALPNQGTVDYPSFKLVIVGDGGTGKTTFVKRHLTGEFEKKYEPTIG |
| | | VEVHPLDFTTNCGKIRFYCWDTAGQEKFGGLRDGYYIHGQCAIIMFDVTSRLTYKNVPTWHRDLCRVCENIPIVLCGNKVDVKNRQVKAKQ |
| | | VTFHRKKNLQYYEISAKSNYNFEKPFLYLARKLAGDANIHFVEAVALKPPEVTFDLAMQQQHEAELAAAAAQPLPDDDDDLVE |
| 22 | M.578 | ....................................PSPPALVPMALPNQGTVDYPSFKLVIVGDGGTGKITFVKRHLTGEFEKKYEPTIG |
| | | VEVHPLDFTTNCGKIRFYCWDTAGQEKFGGLRDGYYIHGQCAIIMFDVTSRLTYKNVPTWHRDLCRVCENIPIVLCGNKVDVKNRQVKAKQ |
| | | VTFHRKKNLQYYEISAKSNYNFEKPFLYLARKLAGDANIHFVEAVALKPPEVTFDLAMQQQHEAELAAAAAQPLPDDDDDLVE |
| 22 | M.352 | ................................................NQGTVDYPSFKLVIVGDGGTGKITFVKRHLTGEFEKKYEPTIG |
| | | VEVHPLDFTTNCGKIRFYCWDTAGQEKFGGLRDGYYIHGQCAIIMFDVTSRLTYKNVPTWHRDLCRVCENIPIVLCG |
| 22 | M.514 | ................................................NQGTVDYPSFKLVIVGDGGTGKITFVKRHLTGEFEKKYEPTIG |
| | | VEVHPLDFTTNCGKIRFYCWDTAGQEKFGGLRDGYYIHGQCAIIMFDVTSRLTYKNVPTWHRDLCRVCENIPIVLCGNKVDVKNRQVKAKQ |
| | | VTFHRKKNLQYYEISAKSNYNFEKPFLYLARKLAGDANIHFVEAVALKPPEVTFDLAMQQQHEAELAAAAAQPLPDDDDDLVE |
| 23 | M.419 | RTSSWGSGASLKIDRRELVTTRIYGFL |
| 23 | M.443 | RTSSWGSGASLKIDRRELVTTRIYGFL |
| 24 | M.540 | ..........LVQRSREZDLHAAVAMATKREVGTLGEADLKGKKVELEADLNVPLDDAQKITDDTRIRASIPIIRFLLEKGARVILAS |
| | | HLGRPKGVTPKFSLKPLVPRLSELLGVEVVMANDCIGEEVEKLAAALPEGGVLLLENVRFYKEEEKNDPEFAKKLASVADLYVNDAFGTAH |
| | | RAHASIEGVIKELRPSVAGELMQKELDYLVGAVANPKKRPIAAIVGGSKVSSKIGVIESLLAKVDILILGGGMIFT |
| 24 | M.640 | ............SRSPPIRSRFLHAAVAMAIKRAVGILGEADLKGKKVFLRADLNVPLDDAQKIIDDTRIRASIPTIKFLLEKGAKVILAS |
| | | HLGRPKGVTPKFSLKPLVPRLSELLGVEVVMANDCIGEEVEKLAAALPEGGVLLLENVRFYKEEEKNDPEFAKKLASVADLYVNDAFGTAH |
| | | RAHASTEGVTKFLRPSVAGFLMQKELDYLVGAVANPKKPFAAIVGGSKVSSKIGVIESLLAKVDILILGGGMIFTFYKAQGKAVGNSLVEE |
| | | DKLELAISLIETAKAKGVSLLLPTDVVVADKFAPDAESKIVPADAIPDGWMGLDVGPDSIKTFSEALDTTKTVIWNGPMGVFEFEKFAAG |
| 24 | M.642 | ............SRSPPIRSRFLHAAVAMAIKRAVGILGEADLKGKKVFLRADLNVPLDDAQKIIDDTRIRASIPTIKFLLEKGAKVILAS |
| | | HLGRPKGVTPKFSLKPLVPRLSELLGVEVVMANDCIGEEVEKLAAALPEGGVLLLENVRFYKEEEKNDPEFAKKLASVADLYVNDAFGTAH |
| | | RAHASTEGVTKFLRPSVAGFLMQKELDYLVGAVANPKKPFAAIVGGSKVSSKIGVIESLLAKVDILILGGGMIFTFYKAQGKAVGNSLVEE |
| | | DKLELAISLIETAKAKGVSLLLPTDVVVADKFAPDAESKIVPADAIPDGWMGLDVGPDSIKTFSEALDTTKTVIWNGPMGVFEFEKFAAGI |
| 24 | M.646 | ...........RPDRRFDLGFLHAAVAMATKRSVGTLGEADLKGKKVFLRADLNVPLDDAQKITDDTRIRASIPTIKFLLEKGAKVILAS |
| | | HLGHPKGVTPKFSLKPLVPRLSELLGVEVVMANDCIGEEVEKLAAALPEGGVLLLENVRFYKEEEKNDPEFAKKLASVADLYVNDAFGTAH |
| | | RAHASTEGVIKFLRPSVAGFLMQKELDYLVGAVANPKKPFAAIVGGSKVSSKIGVIESLLAKVDILILGGGMIFTFYKAQGKAVGNSLVEE |
| | | DKLELATSLIETAKAKGVSLLLPTDVVVADKFAPDAESKIVSADAIPDGWMGLDVGPDSIKTFSEALDTTKTVIWNGPMGVFEFEKFAAGI |
| | | D |
| 24 | M.627 | ......................LHAAVAMATKRSVGILGEADLKGKKVFLRADLNVPLDDAQKIIDDTRIRASIPTIKFLLEKGAKVILAS |
| | | HLGRPKGVTPKFSLKPLVPRLSELLGVEVVMANDCIGEEVEKLAAALPEGGVLLLENVRFYKEEEKNDPEFAKKLASVADLYVNDAFGTAH |
| | | RAHASTEGVTKFLRPSVAGFLMQKELDYLVGAVANPKKPTAAIVGGSKVSSKIGVIESLLAKVDILILGGGMIFTFYKAQGKAVGNSLVEE |
| | | DKLELATSLIETAKAKGVSLLLPTDVVVADKFAPDAESKTVPADAIPDGWMGLDVGPDSIKTFSEALDTTKTVIWNGPMGVFEFEKFAAGI |
| 24 | M.626 | ............................AMATKRSVGTLGEADLKGKKVFLRADLNVPLDDAQKIIDDTRIRASIPTIKFLLEKGAKVILAS |
| | | HLGRPKGVTPKFSLKPLVPRLSELLGVEVVMANDCIGEEVEKLAAALPEGGVLLLENVRFYKEEEKNDPEFAKKLASVADLYVNDAFGTAH |
| | | RAHASTEGVTKFLRPSVAGFLMQKELDYLVGAVANPKKPFAAIVGGSKVSSKIGVIESLLAKVDILILGGGMIFTFYKAQGKAVGNSLVEE |
| | | DKLELATSLIETAKAKGVSLLLPTDVVVADKFAPDAESKTVSADAIPDGWMGLDVGPDSIKTFSEALDTTKTVIWNGPMGVFEFEKFAAGT |
| | | D |
| 24 | M.645 | ..SLSLSLSLSRPDRRRFDLRFLHAAVAMATKRSVGILGEADLKGKKVFLRADLNVPLDDAQKITDDTRIRASIPTIKFLLEKGAKVILAS |
| | | HLGRPKGVTPKFSLKPLVPRLSELLGVEVVMANDCIGEEVEKLAAALPEGGVLLLENVRFYKEEEKNDPEFAKKLASVADLYVNDAFGTAH |
| | | RAHASTEGVTKFLRPSVAGFLMQKELDYLVGAVANPKKPTAAIVGGSKVSSKIGVIESLLAKVDILILGGGMIFTFYEAQGEAVGESLVEE |
| | | DKLELATSLIETAKAKGVSLLLPTDVVVADKFAPDAESKTVPADAIPDGWMGLDVGPDSIKTFSEALDTTKTVIWNGPMGVFE |
| 24 | M.652 | .........LPRPDRRRFDPGFSTQQAAMATKRSVGTLGEADLKGKKVFLRADLNVPLDDAQKITDDTRIRASIPTIKFLLEKGAKVILAS |
| | | HLGRPKGVTPKFSLKPLVPRLSELLGVEVVMANDCIGEEVEKLAAALPEGGVLLLENVRFYKEEEKNDPEFAKKLASVADLYVNDAFGTAH |
| | | RAHASTEGVTKFLRPSVAGFLMQKELDYLVGAVANPKKPTAAIVGGSKVSSKIGVIESLLAKVDILILGGGMIFTFYKAQGKAVGKSLVEE |
| | | DKLELATSLIETAKAKGVSLLLPTDVVVADKFAPDAESKTVSADAIPEGWMGLDVGPDSIKTFSEALDTTKTVIWNGPMGVFEFEKFAA |
| 24 | M.650 | .........LPRPDRRRFDPGFSTQQAAMATKRSVGTLGEADLKGKKVFLRADLNVPLDDAQKITDDTRIRASIPTILFLLEKGAKVILAS |
| | | HLGRPKGVTPKFSLKPLVPRLSELLGVEVVMANDCIGEEVEKLAAALPEGGVLLLENVRFYKEEEKNDPEFAKKLASVADLYVNDAFGTAH |
| | | RAHASTEGVTKFLRPSVAGFLMQKELDYLVGAVANPKKPTAAIVGGSKVSSKIGVIESLLAKVDILILGGGMIFTFYKAQGKAVGKSLVEE |
| | | DKLELATSLIETAKAKGVSLLLPTDVVVADKFAPDAESKTVSADAIPEGWMGLDVGPDSIKTFSEALDTTKTVIWNGPMGVFEFEKFAA |
| 24 | M.559 | ........................................................................................... |
| | | FQGRPKGVTPKFSLKPLVPRLSELLGVEVVMANDCIGEEVEKLAAALPEGGVLLLENVRFYKEEEKNDPEFAKKLASVADLYVNDAFGTAH |
| | | RAHASTEGVTKFLRPSVAGFLMQKELDYLVGAVANPKKPFAAIVGGSKVSSKIGVIESLLAKVDILILGGGMIFTFYKAQGKAVGKSLVEE |
| | | DKLELATSLIETAKAKGVSLLLPTDVVVADKFAPDAESKTVSADAIPDGWMGLDVGPDSIKTFSEALDTTKTVIWNGPMGVFEFEKFAAGT |
| 24 | M.622 | ...........................AMAIKRSVGTLGEADLKGKKVFLRADLNVPLDDAQKITDDTRIRASIPTILFLLEKGAKVILAS |
| | | HLGRPKGVTPKFSLKPLVPRLSELLGVEVVMANDCIGEEVEKLAAALPEGGVLLLENVRFYKEEEKNDPEFAKKLASVADLYVNDAFGTAH |
| | | RAHASTEGVTKFLRPSVAGFLMQKELDYLVGAVANPKKPTAAIVGGSEVSEKIGVIESLLAKVDILILGGGMIFTFYKAQGKAVGKSLVEE |
| | | DKLELAISLIETAKAKGVSLLLPTDVVVADKFAPDAESKTVSADAIPEGWMGLDVGPDSIKTFSEALDITKTVIWNGPMGVFEFEKFAAG |
| 24 | M.565 | ......................................................................................VILAS |
| | | HLGRPKGVTPKFSLKPLVPRLSELLGVEVVMANDCIGEEVEKLAAALPEGGVLLLENVRFYKEEEKNDPEFAKKLASVADLYVNDAFGTAH |
| | | RAHASTEGVTKFLRPSVAGFLMQKELDYLVGAVANPKKPTAAIVGGSKVSSKIGVIESLLAKVDILILGGGMIFTFYKAQGKAVGKSLVEE |
| | | DKLELATSLIETAKAKGVSLLLPTDVVVADKFAPDAESKTVSADAIPEGWMGLDVGPDSIKTFSEALDTTKTVIWNGPMGVFEFEKFAAGT |
| 24 | M.567 | ......................................................................................VILAS |
| | | HLGRPKGVTPKFSLKPLVPRLSELLGVEVVMANDCIGEEVEKLAAALPEGGVLLLENVRFYKEEEKNDPEFAKKLASVADLYVNDAFGTAH |
| | | RAHASTEGVTKFLRPSVAGFLMQKELDYLVGAVANPKKPTAAIVGGSKVSSKIGVIESLLAKVDILILGGGMIFTFYKAQGKAVGKSLVEE |
| | | DKLELATSLIETAKAKGVSLLLPTDVVVADKFAPDAESKTVSADAIPDSWMGLDVGPDSIKTFSEALDITKTVIWNGPMGVFEFEKFAAGT |
| | | D |
| 24 | M.581 | .........................................................LDDAQKITDDTRIRASIPTIKFLLEKGAKVILAS |
| | | HLGRPKGVTPKFSLKPLVPRLSELLGVEVVMANDCIGEEVEKLAAALPEGGVLLLENVRFYKEEEKNDPEFAKKLASVADLYVNDAFGTAH |
| | | RAHASTEGVIKFLRPSVAGFLMQKELDYLVGAVANPKKPFAAIVGGSKVSEKIGVIESLLAKVDILILGGGMIFTFYKAQGKAVGKSLVEE |
| | | DKLELAISLIETAKAKGVSLLLPTDVVVADKFAPDAESKTVSADAIPDGWMGLDVGPDSIKTFSEALDTTKT |
| 25 | M.609 | KSAPALRILRSFPSHS |
| 26 | M.182 | ........................................................................................... |
| | | ........................................................................................... |
| | | ....................................................VAAIKEESEGNLKGILGYVDEDLVSTDFQGDSRSSIFDA |
| | | KAGIALNDNFVKLVSWYDNEWGYSIRVVD |
| 26 | M.134 | ..................IMEKYDIVRGQNHHHDVKVKDAKILLFGEEEVFGCRNPEEIPNGAAGADYVVESIGVFIDKDKA |
| 26 | M.283 | ........................................................................................... |
| | | ........................................................................................... |
| | | ....................................................AATYEQIKAAIKEESEGNLKGILGYVDEDLVSTDFQGDSRSSIFDA |
| | | KAGIALNDNFVKLVSWYDNEWGYSIRVVDLIRHIHATK |
| 26 | M.297 | ........................................................................................... |
| | | ........................................................................................... |
| | | ....................................................VAAIKEESEGNLKGILGYVDEDLVSTDFQGDSRSSIFDA |
| | | KAGIALNDNFVKLVSWYDNEWGYSIRVVDLIRHIHATK |
| 26 | M.367 | ........................................................................................... |
| | | ...................................................................ATQKTVDGPSSKDWRGGRAASFNI |
| | | IPSSTGAAKAVGKVLPVLNGKLTGMAFRVPTVDVSVVDLTVRLEKAAIYEQIKEESEGNLKGILGYVDEDLVSTDFQGDSRSSIFDA |
| | | KAGNALNDNFVKLV |
| 26 | M.84 | .................IMEKYDIVHGQNHHHDVKVKDAKILLFGEKEVFGCRNPEEIPWGAAGADYVVESIGV |
| 26 | M.189 | ........................................................................................... |
| | | ........................................................................................... |
| | | ...............................................EESEGNLKGILGYVDEDLVSTDFQGDSRSSIFDA |
| | | KAGIALNDNFVKLVSWYDNEWGYSIRVVDLIRHIHATK |
| 26 | M.586 | ......VNDPFITTDYMTYMFKYDTVHGQWKHHDVKVKDAKTLLFGEKEVAVFGCRNPEEIPWGAAGADYVVESTGVFTDKDKAAAHIKGG |
| | | AKKVIISAPSKDAPMFVCGVNEKEYTSDITIVSNASCTTNCLAPLAKVINDRFGIVEGLMITVHAMTATQKTVDGPSSKDWRGGRAASFNI |
| | | IPSSTGAAKAVGKVLPVLNGKLTGMAFRVPTVDVSVVDLTVHLEKAATYEQIKAAIREESEGNLKGILGYVDEDLVSTDFQGDSESSIFDA |
| | | KAGIALNDNEVNLVSWYDNEWGY |
| 26 | M.496 | DVELVAVNDPFITTDYMTYMFKYDTVHGQWKHHDVKVKDAKTLLFGEKEVAVFGCRNPEEIPWGAAGADYVVESTGVFTDKDKAAAHIKGG |
| | | AKKVIISAPSKDAPMFVCGVNEKEYTSDITIVSNASCTTNCLAPLAKVINDRFGIVEGLMITVHAMTATQKTVDGPSSKDWRGGRAASFNI |
| | | IPSSTGAAKAVGKVLPVLNGKLTGMAFRVPTVDVSVVDLT |
| 26 | M.255 | DVELVAVNDPFITTDYMTYMFKYDTVHGQWKHHDVKVKDAKTLLFGEKEVAVFGCRNPEEIPWGAAGADYVVESTGVFTDKDKA |
| 26 | M.471 | DVELVAVNDPFITTDYMTYMFKYDTVHGQWKHHDVKVKDAKTLLFGEKEVAVFGCRNPEEIPWGAAGADYVVESTGVFTDKDKAAAHIKGG |
| | | AKKVIISAPSKDAPMFVCGVNEKEYTSDITIVSNASCTTNCLAPLAKVINDRFGIVEGLMITVHAMTATQKTVDGPSSKDWRGGRAASFNI |
| | | IPSSTGAAKAVGKVLPVLNG |
| 26 | M.575 | DVELVAVNDPFITTDYMTYMFKYDTVHGQWKHHDVKVKDAKTLLFGEKEVAVFGCRNPEEIPWGAAGADYVVESTGVFTDKDKAAAHIKGG |
| | | AKKVIISAPSKDAPMFVCGVNEKEYTSDITIVSNASCTTNCLAPLAKVINDRFGIVEGLMITVHAMTATQKTVDGPSSKDWRGGRAASFNI |
| | | IPSSTGAAKAVGKVLPVLNGKLTGMAFRVPTVDVSVVDLTVHLEKAATYEQIKAAIREESEGNLKGILGYVDEDLVSTDFQGDSESSIFDA |
| | | KAGIALNDNEVNL |
| 27 | M.163 | ........................................................................................... |
| | | ........................................................................................... |
| | | ..........................................................PGSDAKKVAPEVTAEYTVRILQRTVPPAVPAIV |
| | | FLSGGQSEEEATVNLNAMYKLQTKKPWFLSFSFGRA |
| 27 | M.314 | ........................................................................................... |
| | | ........................................................................................... |
| | | ........................................................VTPGSDAKKVAPEVTAEYTVRILQRTVPPAVPAIV |
| | | FLSGGQSEEEATVNLNAMNKLQTKKPWFLSFSFGRALQQSTLKAWSGKEENVEKAQKAFLVRCKANSEATL |
| 27 | M.194 | ........................................................................................... |
| | | ........................................................................................... |
| | | ....................................................KPNMVTPGSDAKKVAPEVTAEYTVRILQRTVPPAVPAIV |
| | | FLSGGQSEEEATVNLNAMNKLQTKKPWFLSFSFGR |
| 27 | M.294 | ........................................................................................... |
| | | ........................................................................................... |
| | | ...................................................LKPNMVTPGSDAKKVAPEVTAEYTVRILQRTVPPAVPAIV |
| | | FLSGGQSEEEATVNLNAMNKLQTKKPWFLSFSFGRALQQSTLKAWSGKEENVEKAQKA |
| 27 | M.472 | ........................................................................................... |
| | | .........................................................................SQLSIDQNAQGLARYAII |
| | | CQENGLVPIVEPEILVDGPHDIERCAYVIEVVLAACYKALNDQHVLLEGSLLKPNMVTPGSDAKKVAPEVTAEYTVRILQRTVPPAVPAIV |
| | | FLSGGQSEEEATVNLNAMNKLQTKKPWFLSFSFGRALQQSTLKAWSGKEENVEKAQKAFLVRCKANSEATLGTYKGDATLGEGASESLHVK |
| | | DY |
| 27 | M.369 | ........................................................................................... |
| | | ........................................................................................... |
| | | ........................................................VTPGSDAKKVAPEVTAEYTVRILQRTVPPAVPAIV |
| | | FLSGGQSEEEATVNLNAMNKLQTKKPWFLSFSFGRALQQSTLKAWSGKEENVEKAQKAFLVRCKANSEATLGTYKGDATLGEGASESLHVK |
| | | DYKY |
| 27 | M.104 | ........................................................................................... |
| | | ..................................KETTTQGHDDLGKRCAKYYEAGARFAKWRAVLKIGPNEPSQLSIDQNAQGLARYAML |
| | | GFRREP |
| 27 | M.206 | ........................................................................................... |
| | | .........................................................RFAKWRAVLKIGPNEPSQLSIDQNACGLARYAII |
| | | CQENGLVPIVEPEILVDGPHDIERCAYVTEVVLAACYKALND |
| 27 | M.24 | ........................................................................................... |
| | | ........................................................................................... |
| | | ................................................GSLLKPNMVTPGSDAKKVAPEVIAEYTVRILQRTVPPAVPAIV |
| | | FLSGQS |
| 27 | M.469 | PFANPPQTSTMSAYCGKYKDELIKNAAYIGTFGKGILAADESTGTIGNREASINVENVEDNRRALRELLFTTPGALGHISGVILFEEILVQ |
| | | ESKAGKPFVDILKENNVLPGIKVDNGTVELAGTDKEITTQGHDDLGKRCAKYYEAGARFAFWNAVLKIGPNEPSQLSIGQNAQGLARYAII |
| | | CQENGLVFIVEPEILVDGP |
| 28 | M.420 | VIPPAPHLKRWNRVVDTNLESPNDIVPEGAPFTGSGYRIAPYSSILLKATS |
| 28 | M.444 | VIPPAPHLKRWNRVVDTNLESPNDIVPEGAPFTGSGYRIAPYSSILLKATS |
| 29 | M.697 | ...................................GGVAAGYAAREFAKQGVQPGELAIISKESVAPYERPALSKGYLFPQNAARLPGFHT |
| | | CVGSGGEKLLPEWYTEKGIELILSTEIVKADLASKTLTSAAGATFTYETLLIATGSSTIKLTDFGVQGAEANNILYLRDINDADKLVAAMQ |
| | | AKKDGKAVVVGGGYIGLELSAALKLNNFDVTMVYPEPWCMPRLFTAGIAHFYEGYYASKGINIVKGTVASGFDADANGDVAVVKLKDGRVL |
| | | DANIVIVGVGGRPLTGLFKGQVDEEKGGLKTDTFFETSVAGVYAIGDVASFPMKLYNEPRRVEHVDHARKSAEQAVKAIKAKESGETVAEY |
| | | DYLPYFYSRSFDIAWQFYGDNVGESVLFGDNDPAAAKAKFGIYWVKDGKVVGVFLEGGSADENQAIAKVARAQPPA |
| 29 | M.687 | ...................................GGVAAGYAAREFAKQGVQPGELAIISKESVAPYERPALSKGYLFPQNAARLPGFHT |
| | | CVGSGGEKLLPEWYTEKGIELILSTEIVKADLASKTLTSAAGATFTYETLLIATGSSTIKLTDFGVQGAEANNILYLRDINDADKLVAAMQ |
| | | AKKDGKAVVVGGGYIGLELSAALKLNNFDVTMVYPEPWCMPRLFTAGIAHFYEGYYASKGINIVKGTVASGFDADANGDVAVVKLKDGRVL |
| | | DANIVIVGVGGRPLTGLFKGQVDEEKGGLKTDTFFETSVAGVYAIGDVASFPMKLYNEPRRVEHVDHARKSAEQAVKAIKAKESGETVAEY |
| | | DYLPYFYSRSFDIAWQFYGDNVGESVLFGDNDPAAAKAKFGIYWVKDGKVVGVFLEGGSADENQAIAKV |
| 29 | M.713 | ......LPRSFIHPSTDRSLAEMASEKHFKYVILGGGVAAGYAAREFAKQGVQPGELAIISKESVAPYERPALSKGYLFPQNAARLPGFHT |
| | | CVGSGGEKLLPEWYTEKGIELILSTEIVKADLASKTLTSAAGATFTYETLLIATGSSTIKLTDFGVQGAEANNILYLRDINDADKLVAAMQ |
| | | AKKDGKAVVVGGGYIGLELSAALKLNNFDVTMVYPEPWCMPRLFTAGIAHFYEGYYASKGINIVKGTVASGFDADANGDVAVVKLKDGRVL |
| | | DANIVIVGVGGRPLTGLFKGQVDEEKGGLKTDTFFETSVAGVYAIGDVASFPMKLYNEPRRVEHVDHARKSAEQAVKAIKAKESGETVAEY |
| | | DYLPYFYSRSFDIAWQFYGDNVGESVLFGDNDPAAAKAKFGIYWVKDGKVVGVFLEGGSADENQAIAKVARAQPPASDLEALGKE |
| 29 | M.638 | ...................................RRPRRGYAAREFAKQGVQPGELAIISKESVAPYERPALSKGYLFPQNAARLPGFHT |
| | | CVGSGGEKLLPEWYTEKGIELILSTEIVKADLASKTLTSAAGATFTYETLLIATGSSTIKLTDFGVQGAEANNILYLRDINDADKLVAAMQ |
| | | AKKDGKAVVVGGGYIGLELSAALKLNNFDVTMVYPEPWCMPRLFTAGIAHFYEGYYASKGINIVKGTVASGFDADANGDVAVVKLKDGRVL |
| | | DANIVIVGVGGRPLTGLFKGQVDEEKGGLKTDTFFETSVAGVYAIGDVASFPMKLYNEPRRVEHVDHARKSAEQAVKAIKAKESGETVAEY |
| | | DYLPYFYSRSFDIAWQFYGDNV |
| 29 | M.673 | ........................................................LAIISKESVAPYERPALSKGYLFPQNAARLPGFHT |
| | | CVGSGGEKLLPEWYTEKGIELILSTEIVKADLASKTLTSAAGATFTYETLLIATGSSTIKLTDFGVQGAEANNILYLRDINDADKLVAAMQ |
| | | AKKDGKAVVVGGGYIGLELSAALKLNNFDVTMVYPEPWCMPRLFTAGIAHFYEGYYASKGINIVKGTVASGFDADANGDVAVVKLKDGRVL |
| | | DANIVIVGVGGRPLTGLFKGQVDEEKGGLKTDTFFETSVAGVYAIGDVASFPMKLYNEPRRVEHVDHARKSAEQAVKAIKAKESGETVAEY |
| | | DYLPYFYSRSFDIAWQFYGDNVGESVLFGDNDPAAAKAKFGIYWVKDGKVVGVFLEGGSADENQAIAKVAR |
| 29 | M.700 | .....................................KQRASAAREFAKQGVQPGELAIISKESVAPYERPALSKGYLFPQNAARLPGFHT |
| | | CVGSGGEKLLPEWYTEKGIELILSTEIVKADLASKTLTSAAGATFTYETLLIATGSSTIKLTDFGVQGAEANNILYLRDINDADKLVAAMQ |
| | | AKKDGKAVVVGGGYIGLELSAALKLNNFDVTMVYPEPWCMPRLFTAGIAHFYEGYYASKGINIVKGTVASGFDADANGDVAVVKLKDGRVL |
| | | DANIVIVGVGGRPLTGLFKGQVDEEKGGLKTDTFFETSVAGVYAIGDVASFPMKLYNEPRRVEHVDHARKSAEQAVKAIKAKESGETVAEY |
| | | DYLPYFYSRSFDIAWQFYGDNVGESVLFGDNDPAAAKAKFGIYWVKDGKVVGVFLEGGSADENQAIAKVARAQPPASDLEALGKE |
| 29 | M.702 | ...........IHPSIDRWLAEMASEKHFKYVILGGGVAAGYAAREFAKQGVQPGELAIISKESVAPYERPALSKGYLFPQNAARLPGFHT |
| | | CVGSGGEKLLPEWYTEKGIELILSTEIVKADLASKTLTSAAGATFTYETLLIATGSSTIKLTDFGVQGAEANNILYLRDINDADKLVAAMQ |
| | | AKKDGKAVVVGGGYIGLELSAALKLNNFDVTMVYPEPWCMPRLFTAGIAHFYEGYYASKGINIVKGTVASGFDADANGDVAVVKLKDGRVL |
| | | DANIVIVGVGGRPLTGLFKGQVDEEKGGLKTDTFFETSVAGVYAIGDVASFPMKLYNEPRRVEHVDHARKSAEQAVKAIKAKESGETVAEY |
| | | DYLPYFYSRSFDIAWQFYGDNVGESVLFGDNDPAAAKAKFGIYWVKDGKVVGVFLEGGSADEN |
| 29 | M.707 | .EFRFFLAHSSIHPETDRELAEMASEKHFKRYVILGGGVAAGYAAREFAKQGVQPGELAIIEKESVAPYERPALEKGYLFPQMAARLFGHT |
| | | CVCSGGEKLLPEWYTEKGIELILSTEIVKADLAEKTLTSAAGATFTYETLLIATGSSTIKLTDZGVQGAEANNILYLRDINDADKLVAAMQ |
| | | AKNDGKAVVVGGGYIGLELSAAENLNNFDVIMVYPEPWCMPRLFIACIAHIYEGYYASKINIVKGIVASGFDDADANGDVAVVKLKDGRVL |
| | | DANIVIVGVGGRPLTGLFKGQVDEEKGGLKTDTFFETSVAGVYAIGDVASFPMKLYNEPRRVEHVDHARKSAEQAVKAIRAKESGETVAEY |
| | | DYLPYFYSESFDTAWQFYGDNVGESVLFGDNDPAAKAKFGTYWVKDGKVVGVFLZGGSADEN |
| 29 | M.710 | SSFRFFLAHSSIHPSTDSLAEMASEKHFKYVILGGGVAAGYAAREFAKQGVQPGELAIISKESVAPYERPALSKGYLFPQNAARLPGFHT |
| | | CVGSGGEKLLPEWYTEKGIELILSTEIVKADLASKTLTSAAGATFTYETLLIATGSSTTKLTDFGVQGAEANNILYLRDINDADKLVAAMQ |
| | | AKKDGKAVVVGGGYIGLELSAALKLNNFDVTMVYPEPWCMPRLFTAGIAHFYEGYYASKGINIVKGTVASGFDADANGDVAVVKLKDGRVL |
| | | DANIVIVGVGGRPLTGLFKGQVDEEKGGLKTDTFFETSVAGVYAIGDVASFPMKLYNEPRRVEHVDHARKSAEQAVKAIRAKESGETVAEY |
| | | DYLPYFYSRSFDIAWQFYGDNVGESVLFGDNDPAAAKAKFGTYWVKDGKVVGVFLEGGSADENQAIAKV |
| 29 | M.683 | ..........................................AARFFAKQGVQPGELAITSKESVAPYERPALSKGYLFPQNAARLFGFHT |
| | | CVGSGGEKLLPEWYTEKGIELILSTEIVKADLASKTLTSAAGATFTYETLLIATGSSTTKLTDFGVQGAEANNILYLRDINDADKLVAAMQ |
| | | AKKDGKAVVVGGGYIGLELSAALKLNNFDVTMVYPEPWCMPRLFTAGIAHFYEGYYASKGINIVKGTVASGFDADANGDVAVVKLKDGRVL |
| | | DANIVIVGVGGRPLTGLFKGQVDEEKGGLKTDTFFETSVAGVYAIGDVASFPMKLYNEPRRVEHVDHARKSAEQAVKAIRAKESGETVAEY |
| | | DYLPYFYSRSFDIAWQFYGDNVGESVLFGDNDPAAAKAKFGTYWVKDGKVVGVFLEGGSADENQAIAKV |
| 30 | M.670 | ....MAGGGVEDVYGEDRATEEQFVTPWSFSVASGHSLLRDPRHNKGLAFSEAERDAHYLRGLLPPAIVSQEHQEKKIMHNLRQYTVPLQR |
| | | YIAMMDLQERNERLFYKLLIDNVEELLPVVYTPVVGEACQKYGSIYRRPQGLYTSLKDKGKVLEVLKNWPERSIQVIVVTDGERILGLGDL |
| | | GCQGMGIPVGKLSLYTALGGVRPSACLPITIDVGTNNQTLLDDEYYIGLKQRRATGEEYHELLQEFMNAVKQNYGEKVLVQFEDFANHNAF |
| | | DLLAKYSKSHLVFNDDIQGTASVVLAGLLAALKVIGGGLADQTYLFLGAGEAFTFIAELIALEMSKHTDLPLDDCRKKIWLV |
| 30 | M.643 | ..REMAGGGVEDVYGEDRATEEQFVTPWSFSVASGHSLLRDPRHNKGLAFSEAERDAHYLRGLLPPAIVSQEHQEKKTMHNLRQYTVPLQR |
| | | YIAMMDLQERNERLFYKLLIDNVEELLPVVYTPVVGEACQKYGSIYRRPQGLYTSLKDKGKVLEVLKNWPERSIQVIVVTDGERILGLGDL |
| | | GCQGMGIPVGKLSLYTALGGVRPSACLPITIDVGTNNQTLLDDEYYIGLKQRRATGEEYHELLQEFMNAVKQNYGEKVLVQFEDFANHNAF |
| | | DLLAKYSKSHLVFNDDIQGTASVVLAGLLAALKVIGGGLADQTYLFLGAGEAFTFIAELIALEMSKHTDLPLDDCRKKIWLV |
| 30 | M.663 | ....MAGGGVEDVYGEDRATEEQFVTPWSFSVASGHSLLRDPRHNKGLAFSEAERDAHYLRGLLPPAIVSQEHQEKKIMHNLRQYTVPLQR |
| | | YIAMMDLQERNERLFYKLLIDNVEELLPVVYTPVVGEACQKYGSIYRRPQGLYTSLKDKGKVLEVLKNWPERSIQVIVVTDGERILGLGDL |
| | | GCQGMGIPVGKLSLYTALGGVRPSACLPITIDVGTNNQTLLDDEYYIGLKQRRATGEEYHELLQEFMNAVKQNYGEKVLVQFEDFANHNAF |
| | | DLLAKYSKSHLVFNDDIQGTASVVLAGLLAALKVIGGGLADQTYLFLGAGEAGTGIAELIALEMSKHTDLPLDDCRKKIWLV |
| 30 | M.664 | ....MAGGGVEDVYGEDRATEEQFVTPWSFSVASGHSLLRDPRHNKGLAFSEAERDAHYLRGLLPPAIVSQEHQEKKIMHNLRQYTVPLQR |
| | | YIAMMDLQERNERLFYKLLIDNVEELLPVVYTPVVGEACQKYGSIYRRPQGLYTSLKDKGKVLEVLKNWPERSIQVIVVTDGERILGLGDL |
| | | GCQGMGIPVGKLSLYTALGGVRPSACLPITIDVGTNNQTLLDDEYYIGLKQRRATGEEYHELLQEFMNAVKQNYGEKVLVQFEDFANHNAF |
| | | DLLAKYSKSHLVFNDDIQGTASVVLAGLLAALKVIGGGLADQTYLFLGAGEAGTGIAELIALEMSKHTDLPLDDCRKKIWLV |
| 30 | M.666 | ....MAGGGVEDVYGEDRATEEQFVTPWSFSVASGHSLLRDPRHNKGLAFSEAERDAHYLRGLLPPAIVSQEHQEKKIMHNLRQYTVPLQR |
| | | YIAMMDLQERNERLFYKLLIDNVEELLPVVYTPVVGEACQKYGSIYRRPQGLYTSLKDKGKVLEVLKNWPERSIQVIVVTDGERILGLGDL |
| | | GCQGMGIPVGKLSLYTALGGVRPSACLPITIDVGTNNQTLLDDEYYIGLKQRRATGEEYHELLQEFMNAVKQNYGEKVLVQFEDFANHNAF |
| | | DLLAKYSKSHLVFNDDIQGTASVVLAGLLAALKVIGGGLADQTYLFLGAGEAGTGIAELIALEMSKHTDLPLDDCRKKIWLV |
| 30 | M.748 | ..REMAGGGVEDVYGEDRATEEQFVTPWSFSVASGHSLLRDPRHNKGLAFSEAERDAHYLRGLLPPAIVSQEHQEKKTMHNLRQYTVPLQR |
| | | YIAMMDLQERNERLFYKLLIDNVEELLPVVYTPVVGEACQKYGSIYRRPQGLYTSLKDKGKVLEVLKNWPERSIQVIVVTDGERILGLGDL |
| | | GCQGMGIPVGKLSLYTALGGVRPSACLPITIDVGTNNQTLLDDEYYIGLKQRRATGEEYHELLQEFMNAVKQNYGEKVLVQFEDFANHNAF |
| | | DLLAKYSKSHLVFNDDIQGTASVVLAGLLAALKVIGGGLADQTYLFLGAGEAGTGIAELIALEMSKHTDLPLDDCRKKIWLVDSKGLLVES |
| | | RKESLQHFKKPFAHEHEPLTTLLEAVQSLKPTVLIGTSGVGKTFTQEVVEAMASFNEKPVIFSLSNPTSHSECTAEEAYTWTKGTAVFASG |
| | | SPFDPVEYEGKTYVPGQSNNAYVFPGFGLGVVIEGAINVADDMLLAASEALAEQVSQENFDKGLIFPFFTNIRKIEANIAAKVAAKAYDLG |
| | | LASRLPRPDDLVKYAESCMYPPLYRSYR |
| 30 | M.731 | ..REMAGGGVEDVYGEDRATEEQFVTPWSFSVASGHSLLRDPRHNKGLAFSEAERDAHYLRGLLPPAIVSQEHQEKKTMHNLRQYTVPLQR |
| | | YIAMMDLQERNERLFYKLLIDNVEELLPVVYTPVVGEACQKYGSIYRRPQGLYTSLKDKGKVLEVLKNWPERSIQVIVVTDGERILGLGDL |
| | | GCQGMGIPVGKLSLYTALGGVRPSACLPITIDVGTNNQTLLDDEYYIGLKQRRATGEEYHELLQEFMNAVKQNYGEKVLVQFEDFANHNAF |
| | | DLLAKYSKSHLVFNDDIQGTASVVLAGLLAALKVIGGGLADQTYLFLGAGEAGTGIAELIALEMSKHTDLPLDDCRKKIWLVDSKGLLVES |
| | | RKESLQHFKKPFAHEHEPLTTLLEAVQSLKPTVLIGTSGVGKTFTQEVVEAMASFNEKPVIFSLSNPTSHSECTAEEAYTWTKGTAVFASG |
| | | SPFDPVEYEGKTYVPGQSNNAYVFPGFGLG |
| 30 | M.735 | ..REMAGGGVEDVYGEDRATEEQFVTPWSFSVASGHSLLRDPRHNKGLAFSEAERDAHYLRGLLPPAIVSQEHQEKKTMHNLRQYTVPLQR |
| | | YIAMMDLQERNERLFYKLLIDNVEELLPVVYTPVVGEACQKYGSIYRRPQGLYTSLKDKGKVLEVLKNWPERSIQVIVVTDGERILGLGDL |
| | | GCQGMGIPVGKLSLYTALGGVRPSACLPITIDVGTNNQTLLDDEYYIGLKQRRATGEEYHELLQEFMNAVKQNYGEKVLVQFEDFANHNAF |
| | | DLLAKYSKSHLVFNDDIQGTASVVLAGLLAALKVIGGGLADQTYLFLGAGEAGTGIAELIALEMSKHTDLPLDDCRKKIWLVDSKGLLVES |
| | | RKESLQHFKKPFAHEHEPLTTLLEAVQSLKPTVLIGTSGVGKTFTQEVVEAMASFNEKPVIFSLSNPTSHSECTAEEAYTWTKGTAVFASG |
| | | SPFDPVEYEGKTYVPGQSNNAYVFPGFGLGVVIEGAINVADDMLLAASEALAEQVSQ |
| 30 | M.750 | ..REMAGGGVEDVYGEDRATEEQFVTPWSFSVASGHSLLRDPRHNKGLAFSEAERDAHYLRGLLPPAIVSQEHQEKKTMHNLRQYTVPLQR |
| | | YIAMMDLQERNERLFYKLLIDNVEELLPVVYTPVVGEACQKYGSIYRRPQGLYTSLKDKGKVLEVLKNWPERSIQVIVVTDGERILGLGDL |
| | | GCQGMGIPVGKLSLYTALGGVRPSACLPITIDVGTNNQTLLDDEYYIGLKQRRATGEEYHELLQEFMNAVKQNYGEKVLVQFEDFANHNAF |
| | | DLLAKYSKSHLVFNDDIQGTASVVLAGLLAALKVIGGGLADQTYLFLGAGEAGTGIAELIALEMSKHTDLPLDDCRKKIWLVDSKGLLVES |
| | | RKESLQHFKKPFAHEHEPLTTLLEAVQSLKPTVLIGTSGVGKTFTQEVVEAMASFNEKPVIFSLSNPTSHSECTAEEAYTWTKGTAVFASG |
| | | SPFDPVEYEGKTYVPGQSNNAYVFPGFGLGVVISGAIRVHDDMLLAASEALAEQVSQENFDKGLIFPFFTNIRKISANIAAKVAAKAYDLG |
| | | LASRLPRPDDLVKYAESCMYPPLYRSYR |
| 30 | M.752 | ...EMAGGGVEDVYGEDRATEEQFVTPWSFSVASGHSLLRDPRHNKGLAFSEAERDAHYLRGLLPPAIVSQEHQEKKTMHNLRQYTVPLQR |
| | | YIAMMDLQERNERLFYKLLIDNVEELLPVVYTPVVGEACQKYGSIYRRPQGLYTSLKDKGKVLEVLKNWPERSIQVIVVTDGERILGLGDL |
| | | GCQGMGIPVGKLSLYTALGGVRPSACLPITIDVGTNNQTLLDDEYYIGLKQRRATGEEYHELLQEFMNAVKQNYGEKVLVQFEDFANHNAF |
| | | DLLAKYSKSHLVFNDDIQGTASVVLAGLLAALKVIGGGLADQTYLFLGAGEAGTGIAELIALEMSKHTDLPLDDCRKKIWLVDSKGLLVES |
| | | RKESLQHFKKPFAHEHEPLTTLLEAVQSLKPTVLIGTSGVGKTFTQEVVEAMASFNEKPVIFSLSNPTSHSECTAEEAYTWTKGTAVFASG |
| | | SPFDPVEYEGKTYVPGQSNNAYVFPGFGLGVVISGAIRVHDDMLLAASEALAEQVSQENFDKGLIFPFFTNIRKISANIAAKVAAKAYDLG |
| | | LASRLPRPDDLVKYAESCMYPPLYRSYR |
| 30 | M.756 | ...EMAGGGVEDVYGEDRATEEQFVTPWSFSVASGHSLLRDPRHNKGLAFSEAERDAHYLRGLLPPAIVSQEHQEKKTMHNLRQYTVPLQR |
| | | YIAMMDLQERNERLFYKLLIDNVEELLPVVYTPVVGEACQKYGSIYRRPQGLYTSLKDKGKVLEVLKNWPERSIQVIVVTDGERILGLGDL |
| | | GCQGMGIPVGKLSLYTALGGVRPSACLPITIDVGTNNQTLLDDEYYIGLKQRRATGEEYHELLQEFMNAVKQNYGEKVLVQFEDFANHNAF |
| | | DLLAKYSKSHLVFNDDIQGTASVVLAGLLAALKVIGGGLADQTYLFLGAGEAGTGIAELIALEMSKHTDLPLDDCRKKIWLVDSKGLLVES |
| | | RKESLQHFKKPFAHEHEPLTTLLEAVQSLKPTVLIGTSGVGKTFTQEVVEAMASFNEKPVIFSLSNPTSHSECTAEEAYTWTKGTAVFASG |
| | | SPFDPVEYEGKTYVPGQSNNAYVFPGFGLGVVISGAIRVHDDMLLAASEALAEQVSQENFDKGLIFPFFTNIRKISANIAAKVAAKAYDLG |
| | | LASRLPRPDDLVKYAESCMYTPLYRSYR |
| 30 | M.754 | ...EMAGGGVEDVYGEDRATEEQFVTPWSFSVASGHSLLRDPRHNKGLAFSEAERDAHYLRGLLPPAIVSQEHQEKKTMHNLRQYTVPLQR |
| | | YIAMMDLQERNERLFYKLLIDNVEELLPVVYTPVVGEACQKYGSIYRRPQGLYTSLKDKGKVLEVLKNWPERSIQVIVVTDGERILGLGDL |
| | | GCQGMGIPVGKLSLYTALGGVRPSACLPITIDVGTNNQTLLDDEYYIGLKQRRATGEEYHELLQEFMNAVKQNYGEKVLVQFEDFANHNAF |
| | | DLLAKYSKSHLVFNDDIQGTASVVLAGLLAALKVIGGGLADQTYLFLGAGEAGTGIAELIALEMSKHTDLPLDDCRKKIWLVDSKGLLVES |
| | | RKESLQHFKKPFAHEHEPLTTLLEAVQSLKPTVLIGTSGVGKTFTQEVVEAMASFNEKPVIFSLSNPTSHSECTAEEAYTWTKGTAVFASG |
| | | SPFDPVEYEGKTYVPGQSNNAYVFPGFGLGVVISGAIRVHDDMLLAASEALAEQVSQENFDKGLIFPFFTNIRKISANIAAKVAAKAYDLG |
| | | LASRLPRPDDLVKYAESCMYTPLYRSYR |
| 30 | M.608 | ....MAGGGVEDVYGEDRATEEQFVTPWSFSVASGHSLLRDPRHNKGLAFSEAERDAHYLRGLLPPAIVSQEHQEKKTMHNLRQYTVPLQR |
| | | YIAMMDLQERNERLFYKLLIDNVEELLPVVYTPVVGEACQKYGSIYRRPQGLYTSLKDKGKVLEVLKNWPERSIQVIVVTDGERILGLGDL |
| | | GCQGMGIPVGKLSLYTALGGVRPSACLPITIDVGTNNQTLLDDEYYIGLKQRRATGEEYHELLQEFMNAVKQNYGEKVLVQFEDFANHNAF |
| | | DLLAKYSKSHLVFNDDIQGTASVVLAGLLA |
| 30 | M.740 | .......GGVEDVYGEDRATEEQFVTPWSFSVASGHSLLRDPRHNKGLAFSEAERDAHYLRGLLPPAIVSQEHQEKKTMHNLRQYTVPLQR |
| | | YIAMMDLQERNERLFYKLLIDNVEELLPVVYTPVVGEACQKYGSIYRRPQGLYTSLKDKGKVLEVLKNWPERSIQVIVVTDGERILGLGDL |
| | | GCQGMGIPVGKLSLYTALGGVRPSACLPITIDVGTNNQTLLDDEYYIGLKQRRATGEEYHELLQEFMNAVKQNYGEKVLVQFEDFANHNAF |
| | | DLLAKYSKSHLVFNDDIQGTASVVLAGLLAALKVIGGGLADQTYLFLGAGEAGTGIAELIALEMSKHTDLPLDDCRKKIWLVDSKGLLVES |
| | | RKESLQHFKKPFAHEHEPLTTLLEAVQSLKPTVLIGTSGVGKTFTQEVVEAMASFNEKPVIFSLSNPTSHSECTAEEAYTWTKGTAVFASG |
| | | SPFDPVEYEGKTYVPGQSNNAYVFPGFGLGVVISGAIRVHDDMLLAASEALAEQVSQENFDKGLIFPFFTNIRKISANIAA |
| 31 | M.39 | ICASGQIIRKGFYLTKNVEHKGQVDLVTETDKACEDLIFNHLRKLYPDHKFIGE |
| 32 | M.303 | ................................................IDFISTITRARFEEMKMDLFRLCMEPWERCLELAKMDKSTVH |
| | | DVVLVGGSTRIPKWQQLLQDFFNGRELCRSTWPDEAVAYGAAVQAAILSGEGNFKVQDL |
| 32 | M.389 | VQEFKRKNKKDISGNPRALRRLRTACERAKRTLSSTAQTTIEIDSLFEGIDFYSTITRARFEELNMDLFRKCMEPVEKCLRDAKMDKSTVH |
| | | DVVLVGGSTRIPKVQQLLQDFFNGKELCKSINPDEAVAYGAAVQAAILSGEGNEKVQDL |
| 32 | M.390 | VQEFNRKAKKDMTGNPRALRRLNTACERAKRTLSSTAQTTIEIDEIFECIDFYSTITRARFEELNMDLFRRCMEPVENCLRDARMDRSTVH |
| | | DVVLVGGSTRIPKVQQLLQQFFNGKELCKSINPDEAVAYGAAVQAAILSGEGNEKVQDL |
| 32 | M.284 | ................................................IDFYSTITRARFEEMNMDLFRKCMEPVEKCLRDAKMDKSTVH |
| | | DVVLVGGSTRIPKVQQLLQDFFNGKELCKSINPDEAVAYGAAVQAAILSGE |
| 32 | M.201 | .......................................................RARFEEMMMCFRECMEPVEKCLRDAKMDKSTVH |
| | | DVVLVGGSTRIPKVQQLLQDFFNGKELCKSINPDEAVAYGA |
| 32 | M.28 | .........................................................................VEKCLRDAKMDKSTVH |
| | | DVVLVGGSTRIPKVQQLLQDFFNGKELCKSINPDE |
| 32 | M.364 | ........................................................................................... |
| | | ........................................................................ETAGGVMTTLIPRNTTIPIK |
| | | KEQVFSTYSDNQPGVLIQVYEGERARTRDNNLLGKFELSGIPPAPRGVPQITVCFDIDANGILNVSAEDKTTGQKNKITITNDKGRLSKED |
| | | IEKMVQEAERYKAEDEE |
| 32 | M.344 | ........................................................................................... |
| | | ...................................................................................RNTTIPTK |
| | | KEQVFSTYSDNQPGVLIQVYEGERARIRDNNLLGKFELSGIPPAPRGVPQITVCFDIDANGILNVSAEDKTTGQKNKITITNDKGRLSKED |
| | | IEKMVQEAERYKAEDEE |
| 32 | M.74 | ..................................................................................AKMDKSTVH |
| | | DVVLVGGSTRIPKVQQLLQDFFNGKELCKSINPDEAVAYGAAVQAAILSG |
| 32 | M.180 | ........................................................................................... |
| | | ...........................................AAILRGEGNEKVQDLLLLDVTPLSLGLETAGGVMTTLIPRNTTIPTK |
| | | KEQVFSTYSDNQPGVLIQVYEGER |
| 32 | M.317 | ........................................................................................... |
| | | ..........................CNSTNPDEAVAYGAAVQAAILSGEGNFKVQQLLLLDVIFLSLGLETAGGVMTVLIPRNTTIPTK |
| | | KEQVFSTYSDNQPGVLIQVYEGERARTADNNLLGKFELSGIP |
| 32 | M.298 | ........................................................................................... |
| | | ..................................RPWRTAPPSRPPSSAARATRRCRTCFLLDVIPLSLGLETAGGVMTTLIPRNTTIPTK |
| | | KEQVFSTYSDNQPGVLIQVYEGERARTRDNNLLGKFELSGI |
| 32 | M.192 | ........................................................................................... |
| | | ..........................................................................................K |
| | | KEQVFSTYSDNQPGVLIQVYEGERTRTRDNNLLGKFELSGIPAAPAGVPQITVCFDIGAKGILNVSAEDKITG |
| 32 | M.77 | ........................................................................................... |
| | | ...................................................................................RNTTIPTK |
| | | KEQVFSTYSDNQPGVLIQVYEGERARTRDNNLLGKFELSGIPPAPRGVPQI |
| 32 | M.92 | ...............................................................................LFRECMEPVLKCLRDAKMDKSTVH |
| | | DVVLVGGSTRIPKVQQLLQDFFNGKELCKSIMPDEAV |
| 32 | M.144 | ..............................................................EELNMDLFRKCMEPVEKCLRDAKMDKSTVH |
| | | DVVLVGGSTRIPKVQQLLQDFFNGKELCKSINPDEAV |
| 32 | M.9 | ........................................................................................... |
| | | ..........................................................................................K |
| | | KEQVFSTYSDNQPGVLIQVYEGERARTKIMNLLGKFELSGIP |
| 33 | M.296 | .............................................ELIKATDSWMEASEMLYPDYDSMIPDYDTVITNVRRSLAVAKKNHL |
| | | AWNCERCRKGESKKKIDAISEGNDLGKIIAVLSAFVDPPVTK |
| 33 | M.387 | ....................................................................YDIVITNVRRSLAVAKKNHL |
| | | AWNCERCRKGESKKIVDAISEGNDLEKITAILSAFVDAATK |
| 33 | M.172 | ....................................................................YDIVITNVRRSLAVAKKNHL |
| | | AWNCERCRKGESKKIVDAISEGNDLEKIVAILSAFVDAATK |
| 33 | M.72 | ....................................................................YDIVITNVRRSLAVAKKNHL |
| | | AWNCERCRKGESKKTVDAILSAFVDAATH |
| 33 | M.38 | ................................................................................RSLAVAKKNHL |
| | | AWNCERCRKGESKKTVDAISEGNDLEKIVAILSAFVDAATK |
| 33 | M.239 | ..............................................................PDYDSMIPDYDTVITMNRRELAVAKRNHL |
| | | AWNCERCRKGESKKTVDAISEGNDLGKITAVLSAFVDPPVTK |
| 33 | M.289 | .......................................................KGYNISLASMIPDYDIVITNVRRSLAVAKKNHL |
| | | AWNCERCRKGESKKTVDAISEGNDLEKIVAILSAFVDAATK |
| 33 | M.240 | .............................................................YDSMTPDYDTVISNVRRSLAVAKKNHL |
| | | AWNCERCRKGESKKTVDAISEGNDLEKIVAILSAFVDAATK |
| 33 | M.214 | ........................................................GYNISLASMIPDYDTVITNVRRSLAVAKKNHL |
| | | AWNCERCRKGESKKTVDAISEGNDLEKIVAILSAFVDAATK |
| 33 | M.365 | QEMAYWSLKAAIEIGNGAADAASSLYLFGENLPRGADICYADCHTELLIKATIGWMEASEMLYPDYDSMIPDYDTVINVRRSLAVAKKNHL |
| | | AWNCERCRKGESKKTVDAISEGNDLEKIVAILSAFVDA |
| 34 | M.614 | .........................EEEVEVAPPQAMEVRVKILFTALCHTDVYFWEAKGQTPVFPRIFGHEAGGIVESVGEGVTDVAPGD |
| | | HVLPVFTGECKECRHCKSAESNMCDLLRINTDRGVMISDGKSRFSIDGKPIFHFVGTSTFSEYTVMHVGCVAKINPEAPLDKVCVLSCGIS |
| | | TGLGASINVAKPPKGSTVAIFGLGAVGLAAAEGARIAGASRIIGIDLNANRFEEARKFGCTEFVNPKDHTKPVQEVLAEMTDGGVDRSVEC |
| | | TGNINAMIQAFECVHDGWGVAVLVGVPHKDAEFKTHPMNFLNERTLKGTFFGNFKPRIDLPNVVEMYMKKELEVEKFIIHSV |
| 34 | M.598 | ....NWFCSWVIAAAVAMEAGNPLSIEEVEVAPPQAMEVRVKILFTALCHIDVYFNFAKGQIPVFPRIFGHEAGGTVESVGEGVTDVAPGD |
| | | HVLPVFIGECKECPRCKSAESNMCKLLRINIDRGVMISDGNESRFSIDGNPPIEPFVGISTFSEYTVMHVGCVAKINPEAPLDKVCVLSCGIS |
| | | TGLGASINVAKPPKGSTVAIFGLGAVGLAAAFGARTAGAERITGTDTNANRFEEARKEGCTEFVNPKDHTRPWQEVLAPMTDGGVDESVEC |
| | | TGNTNAMTQAFECVRDGNGVAVLVGVFRKDAEFETRPMVFLNER |
| 34 | M.632 | ...........CKAAVAWEAGKPLSIEEVEVAPRQAMEVRVKILFTALCHTDVYFWEAKGQTPVFPRIFGHEAGGIVESVGEGVTDVAPGD |
| | | HVLPVFTGECKECRHCKSAESNMCDLLRINTDRGVMISDGKSRFSIDGKPIFHFVGTSTFSEYTVMHVGCVAKINPEAPLDKVCVLSCGIS |
| | | TGLGASINVAKPPKGSTVAIFGLGAVGLAAAEGARIAGASRITGIDLNANRFEEARKFGCTEFVNPKDHTKPVQEVLAEMIDGGVDRSVEC |
| | | TGNINAMIQAFECVHDGWGVAVLVGVPHKDAEFKIHPMNFLNERTLKGTFFGNFKPRTDLPNVVEMYMKKELEVEKFITHSV |
| 34 | M.633 | .......................................................................EAGGIVESVGEGVIDVAPGD |
| | | HVLPVFIGECKECRRCKSAESNMCDLLAINTDRGVMISDGKSRFSIDGKPIFHFPPVGISTFEEYTVMAVGCVAKINPEAPLLKVCVLSCGIS |
| | | TGLGASINVAKPPKGSTVAIFGLGAVGLAAAEGARIAGASRTIGIDLNANRFEEARKFGCTEFVNPKDRTEPVQEVLPEMTDGGVDRSVEC |
| | | TGNINAMICAFECVRQGWGVPRNDAEFKTHPMNELNERILKGTFFGNFKPRTDLPNVVEMYMERELEVEKFITNSVTISEINKAF |
| | | DLMANGEGINCIINMER |
| 34 | M.616 | .................................................................RIFGHEAGGIVESVGEGVTDVAPGD |
| | | HVLPVFTGECKECRHCKSAESNMCDLLRINTDRGVMISDGKSRFSIDGKPIFHFVGTSTFSEYTVMHVGCVAKINPEAPLDKVCVLSCGIS |
| | | TGLGASINVAKPPKGSTVAIFGLGAVGLAAAEGARIAGASRIIGIDLNANRFEEARKFGCIEFVNPKDHTKPVQEVLAEMIDGGVDRSVEC |
| | | TGNINAMIQAFECVHDGWGVAVLVGVPHKDAEFKTRPMNFLNERTLKGTFFGNFEPRIDLPNVVEMYMKKELEVEKFITHSVTFSEINKAF |
| | | DLMAKGEGIRCIIIIIRMER |
| 34 | M.690 | ..SFEWICACVRAAAVAWEAGKPLSTEEVFVAPPQAMENRVEILFTALCHTDVIFWEAEGQTPVFPRIFGHEAGGTVESVGEGVTDVAPGG |
| | | HVLPVFTGECKFCRHCKSAESNMCDLLRINIDRGVMISDGKSRFSIDGKPIFHFVGISTESEYTVMHVGCVAKINPEAPLDEVCVLSCGIS |
| | | TGLGASINVAKPPKGSTVAIFGLGAVGLAAAEGARIAGASRIIGIDLNASRFEEAREFGGTEFVNPKDNTPVCEVLAEMIDGGVLSSVEC |
| | | TGNINAMIQAFECVRDGWGVAVLVGVPRKDAEFETRPMNFLSERTLEGTFFGNFEPRIDLPNVVEMYMEKELEVEKPITHSVIFSEINKAF |
| | | DLMAKGEQTRCIIRMEH |
| 34 | M.607 | LMSFSWICACVRAAAVAWEAGKPLSTEEVEVAPPQAMEVRCKILFTALCHTDVYFWEAKGQTPVFPRIFGHEAGGIVESVGEGVTDVAPGD |
| | | HVLPVFTGECKECRHCKSAESNMCDLLRINTDRGVMISDGKSRFSIDGKPIFHFVGTSTFSEYTVMHVGCVAKINPEAPLDKVCVLSCGIS |
| | | TGLGASINVAKPPKGSTVAIFGLGAVGLAAAEGARTAGASRIIGIDLNANRFEEARKFGCTEFVNPKDHTKPVQEVLAEMTDGGVDRSVEC |
| | | TGNINAMIQAFECVHDGWGVAVLVGVPHKDAEFKTHPMNFLNER |
| 34 | M.672 | ..............VWAEAFKFLSTEEVEVAPPQMEVECKILFTALCHTDVYFWEAKGQTPVFPRIFGHEAGGIVESVGEGVTDVAPGD |
| | | HVLPVFTGECKECRHCKSAESNMCDLLRINTDRGVMISDGKSRFSIDGKPIFHFVGTSTFSEYTVMHVGCVAKINPEAPLDKVCVLSCGIS |
| | | TGLGASINVAKPPKGSTVAIFGLGAVGLAAAEGARTAGASRIIGIDLNANRFEEARKFGCTEFVNPKDHTKPVQEVLAEMTDGGVDRSVEC |
| | | TGNINAMIQAFECVHDGWGVAVLVGVPHKDAEFKTHPMNFLNERTLKGTFFGNFKPKTDLPNVVEMTMKEELEVEKFITRSVTFSEINKAF |
| | | DLMARGEGIKCIIRMER |
| 34 | M.545 | ........................................................................................... |
| | | ....VFTGECKECRHCKSAESNMCDLLRINTDRGVMISDGKSRFSIDGKPIFHFVGTSTFSEYTVMHVGCVAKINPEAPLDKVCVLSCGIS |
| | | TGLGASINVAKPPKGSTVAIFGLGAVGLAAAEGARTAGASRIIGIDLNANRFEEARKFGCTEFVNPKDHTKPVQEVLAEMTDGGVDRSVEC |
| | | TGNINAMIQAFECVHDGWGVAVLVGVPHKDAEFKTHPMNFLNERTLKGTFFGNFKPKTDLPNVVEMTMKEELEVEKFITRSVT |
| 34 | M.671 | ...............................................................HEAGGIVESVGEGVTDVAPGD |
| | | HVLPVFTGECKECRHCKSAESNMCDLLRINTDRGVMISDGKSRFSIDGKPIFHFVGTSTFSEYTVMHVGCVAKINPEAPLDKVCVLSCGIS |
| | | TGLGASINVAKPPKGSTVAIFGLGAVGLAAAEGARTAGASRIIGIDLNANRFEEARKFGCTEFVNPKDHTKPVQEVLAEMTDGGVDRSVEC |
| | | TGNINAMIQAFECVHDGWGVAVLVGVPHKDAEFKTHPMNFLNERTLKGTFFGNFKPKTDLPNVVEMTMKEELEVEKFITRSVTFSEINKAF |
| | | DLMARGEGIKCIIRMER |
| 35 | M.272 | ALRWNLQMGHSVLPKSVSEERIKQNLDVVYDWSIPDDLLAKFSETKQTRLMFNFIVNKDSVYTHEELWDGEI |
| 36 | M.301 | QDFKKVNEIYAKYFPSPAPARSTYQVAALFLDARIEIECIAAL |
| 36 | M.202 | QDFKKVNEIYAKYFPSPAPARSTYQVAALFLDARIEIECIAAL |
| 37 | M.492 | MAEDEEAASTLPPGLSSIL |
| 38 | M.647 | .....................................................................VRVAVDVATMPALSE |
| | | TARSRGKDAGVSEKISGAVEEMGFLGAGADADGFPWSNAMLQWQRIGFHFQPEKNWMNDPNGPVFYRGWYHLFYQYNPEGAVWGNIAWGHA |
| | | VSRDLIHWRHLPLAMVPDQWYDINGVWTGSATVFPDGSLNMLYIGSTNASVQVQCLAVPEDPNDSLLRNWTKHPANPVLLPPPGIGLKDFR |
| | | DPTTAWFDDSDSTWRIVIGSKDDNGHAGTAMVYKTKDFVSYELIPGLLHRVDGIGMWECIDFYPVGGNSGEELYVIKESSDDDRHDYYALG |
| | | SYDAAANKWTPQDPEADLGIGLRYDWGKFYASKTFYDPAKKRRVLWGWIAETDSERADVTKGWASLM |
| 38 | M.457 | ........................................................................................... |
| | | ........................................................................................... |
| | | ........................................................................................... |
| | | ..........................AGTAMVYKTKDFVSYELIPGLLHRVDGIGMWECIDFYPVGGNSGEELYVIKESSDDDRHDYYALG |
| | | SYDAAANKWTPQDPEADLGIGLRYDWGKFYASKTFYDPAKKRRVLWGWIAETDSERADVTKGWASLMSIPRIVDLDEKTRINLIQWPVEEI |
| | | ETLRINSTDLGGVTIDHGSVFPLPLRHATQLDIEA |
| 38 | M.686 | ........................................................................................... |
| | | ..GSRGKDAGVSEKISGAVEEMGFLGAGADADGFPWSNAMLQWQRIGFHFQPEKNWMNDPNGPVFYRGWYHLFYQYNPEGAVWGNIAWGHA |
| | | VSRDLIHWRHLPLAMVPDQWYDINGVWTGSATVFPDGSLNMLYIGSTNASVQVQCLAVPEDPNDSLLRNWTKHPANPVLLPPPGIGLKDFR |
| | | DPTTAWFDDSDSTWRIVIGSKDDNGHAGTAMVYKTKDFVSYELIPGLLHRVDGIGMWECIDFYPVGGNSGEELYVIKESSDDDRHDYYALG |
| | | SYDAAANKWTPQDPEADLGIGLRYDWGKFYASKTFYDPAKKRRVLWGWIAETDSERADVTKGWASLMSIPRIVDLDEKTRINLIQWPVEEI |
| | | ETLRINSTDLGGVTIDHGSVFPLPLRHATQLDIEAA |
| 38 | M.495 | ........................................................................................... |
| | | ........................................................................................... |
| | | .......................................................................................KDFR |
| | | DPTTAWFDDSDSTWRIVIGSKDDNGHAGTAMVYKTKDFVSYELIPGLLHRVDGIGMWECIDFYPVGGNSGEELYVIKESSDDDRHDYYALG |
| | | SYDAAANKWTPQDPEADLGIGLRYDWGKFYASKTFYDPAKKRRVLWGWIAETDSERADVTKGWASLMSIPRIVDLDEKTRINLIQWPVEEI |
| | | ETLRINSTDLGGVTIDHGSVFPLPLRHATQLDIE |
| 38 | M.486 | ........................................................................................... |
| | | ........................................................................................... |
| | | .......................................................................................KDFR |
| | | DPTTAWFDDSDSTWRIVIGSKDDNGHAGTAMVYKTKDFVSYELIPGLLHRVDGIGMWECIDFYPVGGNSGEELYVIKESSDDDRHDYYALG |
| | | SYDAAANKWTPQDPEADLGIGLRYDWGKFYASKTFYDPAKKRRVLWGWIAETDSERADVTKGWASLMSIPRIVDLDEKTRINLIQWPVEEI |
| | | ETLRINSTDLGGVTIDHGSVFPLPLRH |
| 38 | M.729 | ........................................................................................... |
| | | ........................................................................................... |
| | | .....................................................................................GLKDFR |
| | | DPTTAWFDDSDSTWRIVIGSKDDNGHAGTAMVYKTKDFVSYELIPGLLHRVDGIGMWECIDFYPVGGNSGEELYVIKESSDDDRHDYYALG |
| | | SYDAAANKWTPQDPEADLGIGLRYDWGKFYASKTFYDPAKKRRVLWGWIAETDSERADVTKGWASLMSIPRIVDLDEKTRINLIQWPVEEI |
| | | ETLRINSTDLGGVTIDHGSVFPLPLRHATQLDIEAAFRLDHAAVAALNEADVSYNCSISGGSANRGALGPFGLLVLADGKEEQTAVYFYVS |
| | | RGLDGALRTHFCHDESRSSRAKDVVKRVVGYTVPVLDGEAFSVRVLVDHSIVESFAMGGRSTATSRVYPTEAIYAAAGVYLFNNAIGSTVI |
| | | VEKLVVHEMDSSYNQIFMAEDL |
| 38 | M.760 | ........................................................................................... |
| | | ...........................................QRTGFHFQPEKNWMNDPNGPVFYRGWYHLFYQYNPEGAVWGNIAWGHA |
| | | VSRDLIHWRHLPLAMVPDQWYDINGVWIGSATVFPDGSLNMLYTGSTNASVQVQCLAVPEDPNDSLLRNWTKHPANPVLLPPPGIGLKDFR |
| | | DPTTAWFDDSDSTWRIVIGSKDDNGHAGTAMVYKTKDFVSYELIPGLLHRVDGIGMWECIDFYPVGGNSGEELYVIKESSDDDRHDYYALG |
| | | SYDAAANKWTPQDPEADLGIGLRYDWGKFYASKTFYDPAKKRRVLWGWIAETDSERADVTKGWASLMSIPRIVDLDEKTRINLIQWPVEEI |
| | | ETLRINSTDLGGVTIDHGSVFPLPLRHATQLDIEAAFRLDHAAVAALNEADVSYNCSISGGSANRGALGPFGLLVLADGKEEQTAVYFYVS |
| | | RGLDGALRTHFCHDESRSSRAKDVVKRVVGYTVPVLDGEAFSVRVLVDHSIVESFAMGGRSTATSRVYPTEAIYAAAGVYLFNNAIGSTVI |
| | | VEKLVVHEMDSSYNQIFMAEDL |
| 38 | M.668 | ......................................GGVKWRAGAAVLAASAVYVLVYASSLAGERYVEVAVPVATMPALSE |
| | | TARSRGKDAGVSEKISGAVEEMGFLGAGADADGFPWSNAMLQWQRIGFHFQPEKNWMNDPNGPVFYRGWYHLFYQYNPEGAVWGNIAWGHA |
| | | VSRDLIHWRHLPLAMVPDQWYDINGVWTGSATVFPDGSLNMLYIGSTNASVQVQCLAVPEDPNDSLLRNWTKHPANPVLLPPPGIGLKDFR |
| | | DPTTAWFDDSDSTWRIVIGSKDDNGHAGTAMVYKTKDFVSYELIPGLLHRVDGIGMWECIDFYPVGGNSGEELYVIKESSDDDRHDYYALG |
| | | SYDAAANKWTPQDPEADLGIGLRYDWGKFYASKTFYDPAKKRRVLWGWIAETDSER |
| 38 | M.559 | ........................................................................................... |
| | | ................GAVEEMGFLGAGADADGFPWSNAMLQWQRIGFHFQPEKNWMNDPNGPVFYRGWYHLFYQYNPEGAVWGNIAWGHA |
| | | VSRDLIHWRHLPLAMVPDQWYDINGVWTGSATVFPDGSLNMLYIGSTNASVQVQCLAVPEDPNDSLLRNWTKHPANPVLLPPPGIGLKDFR |
| | | DPTTAWFDDSDSTWRIVIGSKDDNGHAGTAMVYKTKDFVSYELIPGLLHRVDGIGMWECIDFYPVGGNSGEELYVIKESSDDDRHDYYALG |
| | | SYDAAANKWTPQDPEADLGIGLRYDWGKFYASKTFYDPAKKRRVLWGWIAETDSERAD |
| 38 | M.417 | ........................................................................................... |
| | | ........................................................................................... |
| | | .....................................................................................GLKDER |
| | | DPTTAWFDDSDSTWRIVIGSKDDNGHAGTAMVYKTKDFVSYELIPGLLHRVDGIGMWECIDFYPVGGNSGEELYVIKESSDDDRHDYYALG |
| | | SYDAAANKWTPQDPEADLGIGLRYDWGKFYASKTFYDPAKKRRVLWGWIAETDSERADVTKGWASLM |
| 38 | M.635 | ..............................................................................MPALSE |
| | | TARSRGKDAGVSEKISGAVEEMGFLGAGADADGFPWSNAMLQWQRIGFHFQPEKNWMNDPNGPVFYRGWYHLFYQYNPEGAVWGNIAWGHA |
| | | VSRDLIHWRHLPLAMVPDQWYDINGVWTGSATVFPDGSLNMLYIGSTNASVQVQCLAVPEDPNDSLLRNWTKHPANPVLLPPPGIGLKDFR |
| | | DPTTAWFDDSDSTWRIVIGSKDDNGHAGTAMVYKTKDFVSYELIPGLLHRVDGIGMWECIDFYPVGGNSGEELYVIKESSDDDRHDYYALG |
| | | SYDAAANKWTPQDPEADLGIGLRYDWGKFYASKTFYDPAKKRRVLWGWIAETDSERADVTKGWASLM |
| 38 | M.584 | ........................................................................................... |
| | | .......................................MLQWQRIGFHFQPEKNWMNDPNGPVFYRGWYHLFYQYNPEGAVWGNIAWGHA |
| | | VSRDLIHWRHLPLAMVPDQWYDINGVWTGSATVFPDGSLNMLYIGSTNASVQVQCLAVPEDPNDSLLRNWTKHPANPVLLPPPGIGLKDFR |
| | | DPTTAWFDDSDSTWRIVIGSKDDNGHAGTAMVYKTKDFVSYELIPGLLHRVDGIGMWECIDFYPVGGNSGEELYVIKESSDDDRHDYYALG |
| | | SYDAAANKWTPQDPEADLGIGLRYDWGKFYASKTFYDPAKKRRVLWGWIAETDSERADVTKGWASLM |
| 38 | M.592 | ........................................................................................... |
| | | .......................................MLQWQRIGFHFQPEKNWMNDPNGPVFYRGWYHLFYQYNPEGAVWGNIAWGHA |
| | | VSRDLIHWRHLPLAMVPDQWYDINGVWTGSATVFPDGSLNMLYTGSTNASVQVQCLAVPEDPNDSLLRNWTKHPANPVLLPPPGIGLKDFR |
| | | DPTTAWFDDSDQTWRTVIGSKDDNGHAGIAMVYKTKDFVSYELIPGLLHRVDGTGMWECIDEYPVGGNSGEELYVIKESSDDDRHDYYALG |
| | | SYDAAANKWTPQDPEADLGIGLRYWGKFYASKIFYDPAKKRRVLWGWIAETDSERADVTKGWASLM |
| 38 | M.709 | SESTKIFLESSTMESRAIAGTPPLPYAYEPLPRSSDDAALDDREEGGVEWRACAAVLAASAVVVLVVASGLAGERADEVAVDVAIMFALSE |
| | | IARSRGKDAGVSERTSGAVEEMGFLGAGADADGFPWSNAMLQNQRIGFRFQPEKNNMNDPNGPVFYRGWYHLFYQYNPEGAVWGNIAWGHA |
| | | VSRDLIHWRHLPLAMVPDQWYDINGVWTGSATVFPDGSLNMLYTGSTNASVQVQCLAVPEDPNDSLLRNWTKHPANPVLLPPPGIGLKDFR |
| | | DPTTAWFDDSDQTWRTVIGSKDDNGHAGIAMVYKTKDFVSYELIPGLLHRVDGTGMWECIDEYPVGGDSGEELYVIKESSDDDRRDYYALG |
| | | SYDAAANKWTPQDPEADLGIGLRYWGKFYASKIFYDPAKKRRVLWGWIAETDSERADVTKGWASLM |
| 38 | M.489 | ........................................................................................... |
| | | ........................................................................................... |
| | | ...............................TVFPDGSLNMLYTGSTNASVQVQCLAVPEDPNDSLLRNWTKHPANPVLLPPPGIGLKDFR |
| | | DPTTAWFDDSDQTWRTVIGSKDDNGHAGIAMVYKTKDFVSYELIPGLLHRVDGTGMWECIDFYPVGGDSGEELYVIKESSDDDRHDYYALG |
| | | SYDAAANKWTPQDPEADLGIGLRYWGKFYASKTFYDPAKKRRVLWGWIAETDSERADVTKGWASLM |
| 39 | M.392 | ........................................................................................... |
| | | .........................FVGDKVAYALAQGLKVIACVGEILEQEEAGETMTVVAEQTKAIADKITDNTNVVIAYEPVWAIGTGK |
| | | VAIPAQAQEVHANLRDWLKTNVSPEVAETIRIIYGGSVTGASANELAAQPDVDGFLVGGASLKPEE |
| 39 | M.347 | ........................................................................................... |
| | | ..............................YALAQGLKVIACVGETLEQREAGSTMTVVAEQTKAIADKITDWTNVVIAYEPVWAIGTGK |
| | | VAIPAQAQEVHANLRDWLKTNVSPEVAETIRIIYGGSVTGASANELAAQPDVDGFL |
| 39 | M.458 | ........................................................................................... |
| | | ..........................GDKVAYALAQGLKVIACVGETLEQREAGSTMTVVAEQTKAIADKITDWTNVVIAYEPVWAIGTGK |
| | | VAIPAQAQEVHANLRDWLKTNVSPEVAEIIRIIYGGSVTGAEANELAAQPDVDGFLVGGASLKPEFIDIINAATVKSA |
| 39 | M.464 | PLAVAVAMGRKFFVGGNWKCNGTIDQVDKIVKILNDGKIASTDIVEVVVSPPYVFLPTVKDKLRPEIQVAAQNCWVKKGGAFTGEVSAEML |
| | | ANLGIPWVILGHSERRALLGESSEFVGDKVAYALAQGLKVIACVGETLEQREAGSTMTVVAEQTKAIADKITDWTNVVIAYEPVWAIGTGK |
| | | VATPAQAQEVHANL |
| 39 | M.415 | ...................................DGKIASTDIVEVVVSPPYVFLPTVKDKLRPEIQVAAQNCWVKKGGAFTGEVSAEML |
| | | ANLGIPWVILGHSERRALLGESSEFVGDKVAYALAQGLKVIACVGETLEQREAGSTMTVVAEQTKAIADKITDWTNVVIAYEPVWAIGTGK |
| | | VATPAQAQEVHANL |
| 39 | M.520 | .LAVAVAMGRKFFVGGNWCNGTIDQVDKIVKILNDGKIASTDIVEVVVSPPYVFLPTVKDKLRPEIQVAAQNCWVKKGGAFTGEVSAEML |
| | | ANLGIPWVILGHSERRALLGESSEFVGDKVAYALAQGLKVIACVGETLEQREAGSTMTVVAEQTKAIADKITDWTNVVIAYEPVWAIGTGK |
| | | VATPAQAQEVHANLRDWLKTNVSPEVAETTRIIYGGSVTGASANELAAQPDVDGFLVGG |
| 39 | M.410 | .........................................................................................ML |
| | | ANLGVPWDILGHSERRALLGESSEFVGDKVAYALAQGLKVIACVGETLEQREAGSTMTVVAEQTKAIADKITDWTNVVIAYEPVWAIGTGK |
| | | VATPAQAQEVHANLRDWLKTNVSPEVAETTRIIYGGSVTGASANELAAQPDVDGFLVGGASLKPEF |
| 39 | M.467 | .................LSAEWNHRPVDKIVKILNDGKIASTDIVEVVVSPPYVFLPTVKDKLRPEIQVAAQNCWVKKGGAFTGEVSAEML |
| | | ANLGVPWDILGHSERRALLGESSEFVGDKVAYALAQGLKVIACVGETLEQREAGSTMTVVAEQTKAIADKITDWTNVVIAYEPVWAIGTGK |
| | | VAIPAQAQEVHAN |
| 39 | M.494 | ..............................................LQKHKHFLPTVKDKLRPEIQVAAQNCWVKKGGAFTGEVSAEML |
| | | ANLGVPWDILGHSERRALLGESSEFVGDKVAYALAQGLKVIACVGETLEQREAGSTMTVVAEQTKAIADKITDWTNVVIAYEPVWAIGTGK |
| | | VATPAQAQEVHANLRDWLKTNVSPEVAETTRIIYGGSVTGASANELAAQPDVDGFLVGGASLKPEFIDIINAAIVKSA |
| 39 | M.374 | ........................................................................................... |
| | | ....................................GLKVIACVGETLEQREAGSTMTVVAEQTKAIADKITDWTNVVIAYEPVWAIGTGK |
| | | VATPAQAQEVHANLRDWLKTNVSPEVAETTRIIYGGSVTGASANELAAQPDVDGFLVGGASLKPEFIDIINAAIVKSA |
| 40 | M.118 | GVWQHDRVEIIANDQGNRTIPSYVAFIDSERLIGDAAKNQVAMNPINIVFGHLETCIPYTTHS |
| 41 | M.346 | SSTRGWCSRRRAGRGTSS |
| 42 | M.318 | LPGPAEKPMIVVKYKGEEKQFAAEEIEEMVLIEMREIAEAFLGNSIKNAVVIVPAYFNDSQHQAIKDAGVIAGLNVLRIINEPTAAAIAYG |
| | | LDKKSISIGEKNVLIF |
| 43 | M.519 | ...LDFVWYEPLTYNTEDEFAAHRAREFILGWFMHPITYGHYPETMQRLVADRLFNFTDEQTRLLQGSADIVGVNHYTTYYAKNHENLTHM |
| | | SYANDWQVQLVYERNGIPIGKQGYSKWLYVVPWGFYKAVMHVKDYRNPLMIIGENGIDQSGSDILPHALYDKFRIDYFDQYLHEHKRAID |
| | | DGARVIGYFAWSLLDNFEWRMGFTSKFGIVYVDRKTFTRYPKDSTRWFRKVIKNEE |
| 43 | M.600 | ...LDFVWYEPLTYNTEDEFAAHRAREFILGWFMHPITYGHYPETMQRLVADRLFNFTDEQTRLLQGSADIVGVNHYTTYYAKNHENLTHM |
| | | SYANDWQVQLVYERNGIPIGKQGYSKWLYVVPWGFYKAVMHVKDKYRNPLMIIGENGIDQSGSDILPHALYDKFRIDYFDQYLHELKRAID |
| | | DGARVIGYFAWSLLDNFEWRMGFTSKFGIVYVDRKTFTRYPKDSTRWFRKVIKNEE |
| 43 | M.254 | ........................................................................................... |
| | | ...................................................................HALYDKFRIDYFDQYLHELKRATD |
| | | DGARVTGYFAWSLLDNFEWRMGFTSKFGIVYVDRKTFTRYPKDSTRWFRKVIKNEE |
| 43 | M.438 | ......................................................................IVGVNHYTTYYAKNREMLTHM |
| | | SYANDWQVQLVYERNGIPIGKQGYSKWLYVVPWGFYKAVMHVKDKYRNPLMIIGENGIDQSGSDILPHALYDKFRIDYFDQYLHELKRAID |
| | | DGARVIGYFAWSLLDNFEWRMGFTSKFGIVYVDRKTFTRYPKDSTRWFRKVIKNEE |
| 43 | M.479 | ................................FMHPITYGHYPETMQRLVADRLFNFTDEQTRLLQGSADIVGVNHYTTYYAKNHENLTHM |
| | | SYANDWQVQLVYERNGIPIGKQGYSKWLYVVPWGFYKAVMHVKDKYRNPLMIIGENGIDQSGSDILPHALYDKFRIDYFDQYLHELKRAID |
| | | DGARVIGYFAWSLLDNFEWRMGFTSKFGIVYVDRKTFTRYPKDSTRWFRKVIKNEE |
| 43 | M.523 | GILLDFVWYEPLTYNTEDEFAAHRAREFILGWFMHPITYGHYPETMQRLVADRLFNFTDEQTRLLQGSADIVGVNHYTTYYAKNHENLTHM |
| | | SYANDWQVQLVYERNGIPIGKQGYSKWLYVVFWGFYKAVMHVKDKYRNPLMIIGENGIDQSGSDILPHALYDKFRIDYFDQYLHELKRAID |
| | | DGARVIGYFAWSLLDNFEWRMGFTSKFGIVYVDRKTFTRYPKDSTRNFRKVIKNEE |
| 43 | M.380 | ........................................................................................... |
| | | ..........VYERNGIPIGKQGYSKWLYVVFWGFYKAVMHVKDKYRNPLMIIGENGIDQSGSDILPHALYDKFRIDYFDQYLHELKRAID |
| | | DGARVIGYFAWSLLDNFEWRMGFTSKFGIVYVDRKTFTRYPKDSTRNFRKVIKNEE |
| 43 | M.480 | ........................................................................................... |
| | | ..........VYERNGIPIGKQGYSKWLYVVFWGFYKAVMHVKDKYRNPLMIIGENGIDQSGSDILPHALYDKFRIDYFDQYLHELKRAID |
| | | DGARVIGYFAWSLLDNFEWRMGFTSKFGIVYVDRKTFTRYPKDSTRNFRKVIKNEE |
| 43 | M.371 | ........................................................................................... |
| | | ..........VYERNGIPIGKQGYSKWLYVVPWGFYKAVMHVKDKYRNPLMIIGENGIDQSGSDILPHALYDKFRIDYFDQYLHELKRATD |
| | | DGARVIGYFAWSLLDNFEWRMGFTSKFGIVYVDRKTFTRYPKDSTRWFRKVI |
| 43 | M.482 | ........................................................................................... |
| | | ..........VYERNGIPIGKQGYSKWLYVVFWGFYKAVMHVKDKYRNPLMIIGENGIDQSGSDILPHALYDKFRIDYFDQYLHELKRAID |
| | | DGARVIGYFAWSLLDNFEWRMGFTSKFGIVYVDRKTFTRYPKDSTRNFRKVIKNEE |
| 43 | M.261 | ........................................................................................... |
| | | ..................................................................PHALYDKFRIDYFDQYLHELKRAID |
| | | DGARVIGYFAWSLLDNFEWRMGFTSKFGIVYVDRKTFTRYPKDSTRWFRKVIKNEE |
| 43 | M.108 | ........................................................................................... |
| | | ...................................................................PHALYDKFRIDYFDQYLHELKRAID |
| | | DGARVIGYFAWSLLDNFEWRMGFTSKFGIVYVDRKTFI |
| 43 | M.260 | ........................................................................................... |
| | | ...................................................................HALYDKFRIDYFDQYLHELKRAID |
| | | DGARVIGYFAWSLLDNFEWRMGFISKFGIVYVDRKTFTRYPKDSTRWFRKVIKNEE |
| 43 | M.556 | ..................................................DRLFNFTDEQTRLLQGSADIVGVNHYTTYYAKNHENLTHM |
| | | SYANDWQVQLVYERNGIPIGKQGYSKWLYVVPWGFYKAVMHVKDKYRNPLMIIGENGIDQSGSDTLPHALYDKFRIDYFDQYLHELKRATD |
| | | DGARVIGYFAWSLLDNFEWRMGFTSKFGIVYVDRKTFTRYPKDSTRWFRKVIKNEE |
| 43 | M.461 | ..................................................DRLFNFTDEQTRLLQGSADIVGVNHYTTYYAKNHENLTHM |
| | | SYANDWQVQLVYERNGIPIGKQGYSKWLYVVPWGFYKAVMHVKDKYRNPLMIIGENGIDQSGSDTLPHALYDKFRIDYFDQYLHELKRATD |
| | | DGARVTGYFAWSLLDNFEWRMGFTSKFGIVYVDRKTFTRYPKDSTRWFRKVIKNEE |
| 44 | M.400 | .....GYDDTPKEVTDPDAKKPEDWDDEEDGEWTAPTIPNPEYKGPWKQKKIKNPNYQGKWKAPMIANPDFKDDPYIYAFDSLKYIGIELW |
| | | QVKSGTLFDNILITDDAALAKTFAEETWAKHKDAEKAAFDEAEKKKEEEDASKAGEDDDDLDDEDADDE |
| 44 | M.474 | .....GYDDTPKEVTDPDAKKPEDWDDEEDGEWTAPTIPNPEYKGPWKQKKIKNPNYQGKWKAPMIANPDFKDDPYIYAFDSLKYIGIELW |
| | | QVKSGTLFDNILITDDAALAKTFAEETWAKHKDAEKAAFDEAEKKKEEEDASKAGEDDDDLDDEDADDEDKDDKAESDAEDHSDDEKHDEL |
| 44 | M.490 | .....GYDDTPKEVTDPDAKKPEDWDDEEDGEWTAPTIPNPEYKGPWKQKKIKNPNYQGKWKAPMIANPDFKDDPYIYAFDSLKYIGIELW |
| | | QVKSGTLFDNILITDDAALAKTFAEETWAKHKDAEKAAFDEAEKKKEEEDASKAGEDDDDLDDEDADDEDKDDKAESDAEDHSDDEKHDEL |
| 44 | M.491 | .....GYDDTPKEVTDPDAKKPEDWDDEEDGEWTAPTIPNPEYKGPWKQKKIKNPNYQGKWKAPMIANPDFKDDPYIYAFDSLKYIGIELW |
| | | QVKSGTLFDNILITDDAALAKTFAEETWAKHKDAEKAAFDEAEKKKEEEDASKAGEDDDDLDDEDADDEDKDDKAESDAEDHSDDEKHDEL |
| 44 | M.401 | ..................................................KIKNPNYQGKWKAPMIANPDFKDDPYIYAFDSLKYIGIELW |
| | | QVKSGTLFDNILITDDAALAKTFAEETWAKHKDAEKAAFDEAEKKKEEEDASKAGEDDDDLDDEDADDEDKDDKAESDAEDHSDDEKHDEL |
| 44 | M.470 | ...........KEVTDPDAKKPEDWDDEEDGEWTAPTIPNPEYKGPWKQKKIKNPNYQGKWKAPMIANPDFKDDPYIYAFDSLKYIGIELW |
| | | QVKSGTLFDNILITDDAALAKTFAEETWAKHKDAEKAAFDEAEKKKEEEDASKAGEDDDDLDDEDADDEDKDDKAESDAEDHSDDEKHDEL |
| 44 | M.409 | ................................................................MIANPDFKDDPYIYAFDSLKYIGIELW |
| | | QVKSGTLFDNILITDDAALAKTFAEETWAKHKDAEKAAFDEAEKKKEEEDASKAGEDDDDLDDEDADDE |
| 44 | M.435 | ................................................................MIANPDFKDDPYIYAFDSLKYIGIELW |
| | | QVKSGTLFDNILITDDAALAKTFAEETWAKHKDAEKAAFDEAEKKKEEEDASKAGEDDDDLDDEDADDE |
| 44 | M.553 | ................................................................MIANPDFKDDPYIYAFDSLKYIGIELW |
| | | QVKSGTLFDNILITDDAALAKTFAEETWAKHKDAEKAAFDEAEKKKEEEDASKAGEDDDDLDDEDADDEDKDDKAESDAEDHSDDEKHDEL |
| 44 | M.537 | ................................................................MIANPDFKDDPYIYAFDSLKYIGIELW |
| | | QVKSGTLFDNILITDDAALAKTFAEETWAKHKDAEKAAFDEAEKKKEEEDASKAGEDDDDLDDEDADDEDKDDKAESDAEDHSDDEKHDEL |
| 45 | M.402 | MARMKRPPRCCQDLVVLPL |
| 45 | M.481 | .........MNNMSSR |
| 45 | M.483 | .........MNNMSSR |
| 45 | M.554 | MARMKRPPRCCQDLVVLPL |
| 45 | M.538 | MARMKRPPRCCQDLVVLPL |
| 46 | M.234 | QARGLLRRARGGPHHRRQRGAHRRVPLRPLRHRVRVHGQEGRRAKLRSAGEVEIQFRRVKCKYPEGTKVTFHVEKGSNPN |
| 46 | M.237 | QARGLLRRARGGPHHRRQRGAHRRVPLRPLRHRVRVHGQEGRRAKLRSAGEVEIQFRRVKCKYPEGTKVTFHHVVGVGPLLH |
| 46 | M.264 | QARGLLRRARGGPHHRRQRGAHRRVPLRPLRHRVRVHGQEGRRAKLRSAGEVEIQFRRVKCKYPEGTKVTFHVEKGSNPNTWGCW |
| 47 | M.563 | .TDAAAPAPAAAAASKWNLLTFDTEEDVAVSLAKYTAELSGKFAAERGAFTVVLSGGTLIDTLRKLAEPPYLETVQWSKWHVFWVDERVVP |
| | | KDHVDSNYKLAVDGLLSKVPIPTDQVYATNDTLSAEGAAADYETVLKQLVKSGVLAMSTATGFPRFDLMLLGMGPDGHLASLFPGHPLLNE |
| | | NQKWVTHTMDSPKPPPQRITFTFPVIKSSAYVAMVVTGPGEASAVKKVLSDDKTLPLLPTEMAILQDGEFTWFTDKPAVSMLQNK |
| 47 | M.566 | ATDAAAPAPAAAAASKWNLLTFDTEEDVAVSLAKYTAELSGKFAAERGAFTVVLSGGTLIDTLRKLAEPPYLETVQWSKWHVFWVDERVVP |
| | | KDHVDSNYKLAVDGLLSKVPIPTDQVYATNDTLSAEGAAADYETVLKQLVKSGVLAMSTATGFPRFDLMLLGMGPDGHLASLFPGHPLLNE |
| | | NQKWVTHTMDSPKPPPQRITFTFPVIKSSAYVAMVVTGPGEASAVKKVLSDDKTLPLLPTEMAILQDGEFTWFTDKPAVSMLQNK |
| 47 | M.532 | .......................................................GGTLIDTLRKLAEPPYLETVQWSKWHVFWVDERVVP |
| | | KDHVDSNYKLAVDGLLSKVPIPTDQVYATNDTLSAEGAAADYETVLKQLVKSGVLAMSTATGFPRFDLMLLGMGPDGHLASLFPGHPLLNE |
| | | NQKWVTHTMDSPKPPPQRITFTFPVIKSSAYVAMVVTGPGEASAVKKVLSDDKTLPLLPTEMAILQDGEFTWFTDKPAVSMLQNK |
| 47 | M.557 | ...........AAASKWNLLTFDTEEDVAVSLAKYTAELSGKFAAERGAFTVVLSGGTLIDTLRKLAEPPYLETVQWSKWHVFWVDERVVP |
| | | KDHVDSNYKLAVDGLLSKVPIPTDQVYATNDTLSAEGAAADYETVLKQLVKSGVLAMSTATGFPRFDLMLLGMGPDGHLASLFPGHPLLNE |
| | | NQKWVTHTMDSPKPPPQRITFTFPVIKSSAYVAMVVTGPGEASAVKKVLSDDKTLPLLPTEMAILQDGEFTWFTDKPAVSMLQNK |
| 47 | M.573 | ...........AAASKWNLLTFDTEEDVAVSLAKYTAELSGKFAAERGAFTVVLSGGTLIDTLRKLAEPPYLETVQWSKWHVFWVDERVVP |
| | | KDHVDSNYKLAVDGLLSKVPIPTDQVYATNDTLSAEGAAADYETVLKQLVKSGVLAMSTATGFPRFDLMLLGMGPDGHLASLFPGHPLLNE |
| | | NQKWVTHTMDSPKPPPQRITFTFPVIKSSAYVAMVVTGPGEASAVKKVLSDDKTLPLLPTEMAILQDGEFTWFTDKPAVSMLQNK |
| 47 | M.549 | ...........AAASKWNLLTFDTEEDVAVSLAKYTAELSGKFAAERGAFTVVLSGGTLIDTLRKLAEPPYLETVQWSKWHVFWVDERVVP |
| | | KDHVDSNYKLAVDGLLSKVPIPTDQVYATNDTLSAEGAAADYETVLKQLVKSGVLAMSTATGFPRFDLMLLGMGPDGHLASLFPGHPLLNE |
| | | NQKWVTHTMDSPKPPPQRITFTFPVIKSSAYVAMVVTGPGEASAVKKVLSDDKTLPLLPTEMAILQDGEFTWFTDKPAVSMLQNK |
| 47 | M.550 | ...........AAASKWNLLTFDTEEDVAVSLAKYTAELSGKFAAERGAFTVVLSGGTLIDTLRKLAEPPYLETVQWSKWHVFWVDERVVP |
| | | KDHVDSNYKLAVDGLLSKVPIPTDQVYATNDTLSAEGAAADYETVLKQLVKSGVLAMSTATGFPRFDLMLLGMGPDGHLASLFPGHPLLNE |
| | | NQKWVTHTMDSPKPPPQRITFTFPVIKSSAYVAMVVTGPGEASAVKKVLSDDKTLPLLPTEMAILQDGEFTWFTDKPAVSMLQNK |
| 47 | M.551 | ...........AAASKWNLLTFDTEEDVAVSLAKYTAELSGKFAAERGAFTVVLSGGTLIDTLRKLAEPPYLETVQWSKWHVFWVDERVVP |
| | | KDHVDSNYKLAVDGLLSKVPIPTDQVYATNDTLSAEGAAADYETVLKQLVKSGVLAMSTATGFPRFDLMLLGMGPDGHLASLFPGHPLLNE |
| | | NQKWVTHTMDSPKPPPQRITFTFPVIKSSAYVAMVVTGPGEASAVKKVLSDDKTLPLLPTEMAILQDGEFTWFTDKPAVSMLQNK |
| 47 | M.558 | .....TDAAAPAAASKWNLLTFDTEEDVAVSLAKYTAELSGKFAAERGAFTVVLSGGTLIDTLRKLAEPPYLETVQWSKWHVFWVDERVVP |
| | | KDHVDSNYKLAVDGLLSKVPIPTDQVYATNDTLSAEGAAADYETVLKQLVKSGVLAMSTATGFPRFDLMLLGMGPDGHLASLFPGHPLLNE |
| | | NQKWVTHTMDSPKPPPQRITFTFPVIKSSAYVAMVVTGPGEASAVKKVLSDDKTLPLLPTEMAILQDGEFTWFTDKPAVSMLQNK |
| 47 | M.463 | ....ATDAAAPAAASKWNLLTFDTEGDVAVSLAKYTAELSGKFAAERGAFTVVLSGGTLIDTLRKLAEPPYLETVQWSKWHVFWVDERVVP |
| | | KDHVDSNYKLAVDGLLSKVPIPTDQVYATNDTLSAEGAAADYETVLKQLVKSGVLAMSTATGFPRFDLMLLGMGPDGHLASLFPGHPLLNE |
| | | NQKWVTHTMDSPKPPP |
| 48 | M.684 | ................................................................RAHIAFYQVCFEQKGCDRDDILAAVDE |
| | | AIEDGVDVLSLSLGGNPGADFSEDPVSLGGYTAALNGVFVSTAAGNIGPNPATLSNGAPWLLTVGASTSDRRFAATVKLGSGLEVDGESLT |
| | | EPKDYGKEMVPLVRDMGGGQCTSESVLKAQNITGKIIICEAGGGVSTAKAKMVLRAGAFGMIVVAPAVFGPVIVPRPHVLPTVQVPYAVGQ |
| | | KIKAYLEAESSPTANFIFKGTLFDTPRSPMMAPFSSRGPNVKSRGILKPDIIGPGVNVLAGVPGVVDMALQPKFVMPKFDIKSGTSMSCPH |
| | | LAGIAALLKNAHPTWSPASIKSALMTTTETTDNTKKPIADVDGTQATYFATGAGHVNPKKAMDPGLVYNLTAAEYTPYLCGLKYTDQQVNS |
| | | IIHP |
| 48 | M.739 | ................................................................RAHIAFYQVCFEQKGCDRDDILAAVDE |
| | | AIEDGVDVLSLSLGGNPGADFSEDPVSLGGYTAALNGVFVSTAAGNIGPNPATLSNGAPWLLTVGASTSDRRFAATVKLGSGLEVDGESLT |
| | | EPKDYGKEMVPLVRDMGGGQCTSESVLKAQNITGKIIICEAGGGVSTAKAKMVLRAGAFGMIVVAPAVFGPVIVPRPHVLPTVQVPYAVGQ |
| | | KIKAYLEAESSPTANFIFKGTLFDTPRSPMMAPFSSRGPNVKSRGILKPDIIGPGVNVLAGVPGVVDMALQPKFVMPKFDIKSGTSMSCPH |
| | | LAGIAALLKNAHPTWSPASIKSALMTTTETTDNTKKPIADVDGTQATYFATGAGHVNPKKAMDPGLVYNLTAAEYTPYLCGLKYTDQQVNS |
| | | IIHPEPPVTCDKLRKLDQKDLNYPSITVVVDKADSVVNASRAVTNVGVASSTYDVEVEVPKSVTVEVHPPKLTFKALEEVLNYTVTVKTAA |
| | | VPLGATEGQLKWVSSKHIVRSPILILPGTGEEDTTEAAAPSAQP |
| 48 | M.637 | ........................................................................................... |
| | | ........................................................................................... |
| | | ..........................................................FGMIVVAPAVFGPVIVPRPHVLPTVQVPYAVGQ |
| | | KIKAYLEAESSPTANFIFKGTLFDTPRSPMMAPFSSRGPNVKSRGILKPDIIGPGVNVLAGVPGVVDMALQPKFVMPKFDIKSGTSMSCPH |
| | | LAGIAALLKNAHPTWSPASIKSALMTTTETTDNTKKPIADVDGTQATYFATGAGHVNPKKAMDPGLVYNLTAAEYTPYLCGLKYTDQQVNS |
| | | IIHPEPPVTCDKLRKLDQKDLNYPSITVVVDKADSVVNASRAVTNVGVASSTYDVEVEVPKSVTVEVHPPKLTFKALEEVLNYTVTVKTAA |
| | | VPDGAIEGQLKWVEEKAIVRSPILILPGTGEEDTTEAAAPSAQP |
| 48 | M.517 | .NKLIGARSFFESAKWKWKGLDDPVLPINEGQHGTHISSTAAGAFVRGANISGNAVGTAAGMAPRAHIAFYQVCFEQKGCDRDDILAAVDE |
| | | AIEDGVDVLSLSLGGNPGADFSEDPVSLGGYTAALNGVFVSTAAGNIGPNPATLSNGAPWLLTVGASTSDRRFAATVKLGSGLEVDGESLT |
| | | EPKDYGKEMVPLVRDMGGGQCTSESVLKAQNITGKIIICEAGGGVSTAKAKMVLRA |
| 48 | M.712 | ........................................................................................... |
| | | ..............................................................TVGASTSDRRFAATVKLGSGLEVDGESLT |
| | | EPKDYGKEMVPLVRDMGGGQCTSESVLKAQNITGKTTTCEAGGGVSTAKAKMVLRAGAFGMIVVAPAVFGPVIVPRPHVLPTVQVPYAVGQ |
| | | KIKAYLEAESSPTANFIFKGTLFDTPRSPTMAPFSSRGPNVKSRGILKPDIIGPGVNVLAGVPGVVDIVLQPKEVMPKFDIKSGTSMSCPH |
| | | LAGIAALLKNAHPTWSPASIKSALMTTTETTDNTKKPIADVDGTQATYFAIGAGHVNPKKAMPDGLVYNLIAAEYIPYLGGLKYTDQQVNS |
| | | ITHPEPPVTCDKLRKLDKDLNYPSITVVVKADSVNASAVTNVGVSSTASRAVINYVEVEVPKSVTVEVPPKLTFKALEEVLNYTVTVKTAA |
| | | VPLGATEGQLKWVSSNHIVREPILILPGIGEEDTTEAAAPSAQP |
| 48 | M.732 | ..................................................................HIAFYQVCFEQKGCDRDDILAAVDE |
| | | AIEDGVDVLSLSLGGNPGADFSEDPVSLGGYTAALNGVFVSTAAGNIGPNPATLSNGAPWLLTVGASTSDRRFAATVKLGSGLEVDGESLT |
| | | EPKDYGKEMVPLVRDMGGGQCTSESVLKAQNITGKTTTCEAGGGVSTAKAKMVLRAGAFGMIVVAPAVFGPVIVPRPHVLPTVQVPYAVGQ |
| | | KIKAYLEAESSPTANFIFKGTLFDTPRSPTMAPFSSRGPNVKSRGILKPDIIGPGVNVLAGVPGVVDIVLQPKEVMPKFDIKSGTSMSCPH |
| | | LAGIAALLKNAHPTWSPASIKSALMTTTETTDNTKKPIADVDGTQATYFAIGAGHVNPKKAMPDGLVYNLIAAEYIPYLGGLKYTDQQVNS |
| | | ITHPEPPVTCDKLRKLDKDLNYPSITVVVKADSVNASAVTNVGVSSTASRAVINYVEVEVPKSVTVEVPPKLTFKALEEVLNYTVTVKTAA |
| | | VPDGATE |
| 48 | M.711 | ........................................................................................... |
| | | ................................................................GASTSDRRFAATVKLGSGLEVDGESLT |
| | | EPKDYGKEMVPLVRDMGGGQCTSESVLKAQNITGKTTTCEAGGGVSTAKAKMVLRAGAFGMIVVAPAVFGPVIVPRPHVLPTVQVPYAVGQ |
| | | KIKAYLEAESSPTANFIFKGTLFDTPRSPTMAPFSSRGPNVKSRGILKPDIIGPGVNVLAGVPGVVDIVLQPKEVMPKFDIKSGTSMSCPH |
| | | LAGIAALLKNAHPTWSPASIKSALMTTTETTDNTKKPIADVDGTQATYFAIGAGHVNPKKAMPDGLVYNLIAAEYIPYLGGLKYTDQQVNS |
| | | ITHPEPPVTCDKLRKLDKDLNYPSITVVVKADSVNASAVTNVGVSSTASRAVINYVEVEVPKSVTVEVPPKLTFKALEEVLNYTVTVKTAA |
| | | VPLGATEGQLKWVSSNHIVREPILILPGIGEEDTTEAAAPSAQP |
| 48 | M.730 | ..............................................................................GCDRDDILAAVDE |
| | | AIEDGVDVLSLSLGGNPGADFSEDPVSLGGYTAALNGVFVSTAAGNIGPNPATLSNGAPWLLTVGASTSDRRFAATVKLGSGLEVDGESLT |
| | | EPKDYGKEMVPLVRDMGGGQCTSESVLKAQNITGKTTTCEAGGGVSTAKAKMVLRAGAFGMIVVAPAVFGPVIVPRPHVLPTVQVPYAVGQ |
| | | KIKAYLEAESSPTANFIFKGTLFDTPRSPTMAPFSSRGPNVKSRGILKPDIIGPGVNVLAGVPGVVDIVLQPKEVMPKFDIKSGTSMSCPH |
| | | LAGIAALLKNAHPTWSPASIKSALMTTTETTDNTKKPIADVDGTQATYFAIGAGHVNPKKAMPDGLVYNLIAAEYIPYLGGLKYTDQQVNS |
| | | ITHPEPPVTCDKLRKLDKDLNYPSITVVVKADSVNASAVTNVGVSSTASRAVINYVEVEVPKSVTVEVPPKLTFKALEEVLNYTVTVKTAA |
| | | VPLGATEGQLKWV |
| 48 | M.736 | ..............................................................................GCDRDDILAAVDE |
| | | AIEDGVDVLSLSLGGNPGADFSEDPVSLGGYTAALNGVFVSTAAGNIGPNPATLSNGAPWLLTVGASTSDRRFAATVKLGSGLEVDGESLT |
| | | EPKDYGKEMVPLVRDMGGGQCTSESVLKAQNITGKTTTCEAGGGVSTAKAKMVLRAGAFGMIVVAPAVFGPVIVPRPHVLPTVQVPYAVGQ |
| | | KIKAYLEAESSPTANFIFKGTLFDTPRSPTMAPFSSRGPNVKSRGILKPDIIGPGVNVLAGVPGVVDIVLQPKEVMPKFDIKSGTSMSCPH |
| | | LAGIAALLKNAHPTWSPASIKSALMTTTETTDNTKKPIADVDGTQATYFAIGAGHVNPKKAMPDGLVYNLIAAEYIPYLGGLKYTDQQVNS |
| | | ITHPEPPVTCDKLRKLDKDLNYPSITVVVKADSVNASAVTNVGVSSTASRAVINYVEVEVPKSVTVEVPPKLTFKALEEVLNYTVTVKTAA |
| | | VPLGATEGQLKWVSSNHIVREPILILPGIGEEDTTEAAAPSAQP |
| 48 | M.737 | ..............................................................................GCDRDDILAAVDE |
| | | AIEDGVDVLSLSLGGNPGADFSEDPVSLGGYTAALNGVFVSTAAGNIGPNPATLSNGAPWLLTVGASTSDRRFAATVKLGSGLEVDGESLT |
| | | EPKDYGKEMVPLVRDMGGGQCTSESVLKAQNITGKTTTCEAGGGVSTAKAKMVLRAGAFGMIVVAPAVFGPVIVPRPHVLPTVQVPYAVGQ |
| | | KIKAYLEAESSPTANFIFKGTLFDTPRSPTMAPFSSRGPNVKSRGILKPDIIGPGVNVLAGVPGVVDIVLQPKEVMPKFDIKSGTSMSCPH |
| | | LAGIAALLKNAHPTWSPASIKSALMTTTETTDNTKKPIADVDGTQATYFAIGAGHVNPKKAMPDGLVYNLIAAEYIPYLGGLKYTDQQVNS |
| | | ITHPEPPVTCDKLRKLDKDLNYPSITVVVKADSVNASAVTNVGVSSTASRAVINYVEVEVPKSVTVEVPPKLTFKALEEVLNYTVTVKTAA |
| | | VPLGATEGQLKWVSSNHIVREPILILPGIGEEDTTEAAAPSAQP |
| 48 | M.247 | NNKLIGARSFFESARWKWRGLDDPVLPINEGQHGTATESTAAGAFVAGANISGNAVGIAAGMAPRANTAFYQVCFEQRGCD |
| 49 | M.13 | ....................PRSWSAVMLTFDNAGMWNVRSNVWERHYLGEQLYISVISPARSL |
| 49 | M.57 | ...........VSRHSIQVYPRSWSAVMLTFDNAGMWNVRSNVWERHYLGEQLYISVISPARSLRDEY |
| 49 | M.61 | ELRKTYNLLDAVSRRSIQVYPRSWSAVMLTFDNAGMWNVRSNVWERHYLGEMTLM |
| 49 | M.47 | ELRKTYNLLDAVSRRSIQVYPRSWSAVMLTFDNAGMWNVRSNVWERHYLAGEMTLM |
| 49 | M.43 | ELRKTYNLLDAVSRRSIQVYPRSWSAVMLTFDNAGMWNVRSNVWERHYLGEQLYI |
| 49 | M.32 | ....TYNLLDAVSRRSIQVYPRSWSAVMLTFDNAGMWNVRSNVWERHYLGEMTLM |
| 50 | M.518 | RGGFSGLFPDSSEYAFRTAVSSSMPGVVLFCDLKFSSDGVGFCIGNLRLDNITLIDKDFASRGSTYQVNGQDVQGWFSLDFKSKELHEIPM |
| | | IGNILSRSQIFDGIPNLMSLDNVVKIVDPNEIWVNVEYDSFYREHGLSSEDYILGLPKEFPVIWVSSPEVALLKSLAGKLRNSTKLIFRFL |
| | | REDLVEPTTKMTYGELLKDLKSIKAFASGILVPKQFIWPMNKDMYLEPSTSLVKDAR |
| 51 | M.267 | .....KIETELTKICEGILNLLETHLVPSSIAPESRVFYLNMKGDYHPYLAEFNSGAERKEAAESTMNSYNAAQDIALADLAPTHPIRLGL |
| | | AL |
| 51 | M.73 | ...........................................GDYHPYLAEFNSGAERKEAAESTMNSYNAAQDIALADLAPTHPIRLGL |
| | | ALKIS |
| 51 | M.270 | KDYHGKIETELTKICEGILNLLETHLVPSSIAPESRVFYLNMKGDYHPYLAEFNSGAERKEAAESTMNSYNAAQDIALADLAPTHPIHLG |
| 51 | M.150 | ............................SAGAAESKVFYLKMKGDYHRYLAAEFKSGAERKEAAESTMNSYKAAQDIALADLAPTHPIRLGL |
| | | ALNF |
| 52 | M.366 | ........................................................................................... |
| | | .............VECADIVALGTRDAVRISGGPAYEVPIGRRDELVSNREEADNNLPGPDIPIPKLTSEFLSEGFTPYEMVVLLAGGRSI |
| | | GKVRCIFTEPDATPHDPGYQASISKLCDGPNRDTGFVNMDEHNPNVGEVA |
| 52 | M.679 | LLGLLAPLASAQLSREFYKASCPDAEKIVAAVIEKKLKEDPGPAAGLLRLLFHDCFANGCDASILIDPLSNQSAEKEAGPNISVRGFEVID |
| | | DIKKELEAKCPKTVSCADIVALGTRDAVRISGGPAYEVPTGRRDSLVSNREEADNNLPGPDIPIPKLTSEFLSRGFTPEEMVVLLAGGHSI |
| | | GKVRCIFTEPDATPMDPGYQASISKLCDGPNRDTGFVNMDEHNPNVIDSSYFANVLAKKMPLTVDRLLGLDSKITPIIKNMLNKPNDFMPI |
| | | FAKAMEKLSVLKVITGKDGEIRKSHCSEFNNPMPSTGGVIRISSANPEDLEGLSSGGTQVAGIVSQGTKDPWHVKTLKAAGAAHPKKVTGR |
| | | HPKLRGAHPQ |
| 52 | M.680 | LLGLLAPLASAQLSREFYKASCPDAEKIVAAVIEKKLKEDPGPAAGLLRLLFHDCFANGCDASILIDPLSNQSAEKEAGPNISVRGFEVID |
| | | DIKKELEAKCPKTVSCADIVALGTRDAVRISGGPAYEVPTGRRDSLVSNREEADNNLPGPDIPIPKLTSEFLSRGFTPEEMVVLLAGGHSI |
| | | GKVRCIFTEPDATPMDPGYQASISKLCDGPNRDTGFVNMDEHNPNVIDSSYFANVLAKKMPLTVDRLLGLDSKITPIIKNMLNKPNDFMPI |
| | | FAKAMEKLSVLKVITGKDGEIRKSHCSEFNNPMPSTGGVIRISSANPEDLEGLSSGGTQVAGIVSQGTKDPWHVKTLKAAGAAHPKKVTGR |
| | | HPKLRGAHPQ |
| 52 | M.230 | ..........................................................GCDADILIDPLSNQSAEKEAGPNISVRGFEVID |
| | | DIKKELEAKCPKTVSCADIVALGTRDAVRISG |
| 52 | M.530 | ........................................................................................... |
| | | ..........................................................PAYEVPTGRRDSLVSNREEADNNLPGPDIPIPKLTSEFLSRGFTPEEMVVLLAGGHSI |
| | | GKVRCIFTEPDATPMDPGYQASISKLCDGPNRDTGFVNMDEHNPNVIDSSYFANVLAKKMPLTVDRLLGLDSKITPIIKNMLNKPNDFMPI |
| | | FAKAMEKLSVLKVITGKDGEIRKHSCSEFNNPMPSTGGVIRISSANPEDLEGLSSGGTQVAGIVSQGTKDPWHVKTLKAAGAAHPKKVTGR |
| | | HPKLRGAHPQ |
| 52 | M.667 | LLGLLAPLASAQLSREFYKASCPDAEKIVAAVIEKKLKEDPGTAAGLLRLLFHDCFANGCDASILIDPLSNQSAEKEAGPNISVRGFEVID |
| | | DIKKELEAKCPKTVSCADIVALGTRDAVRISGGPAYEVPTGRRDSLVSNREEADNNLPGPDIPIPKLTSEFLSRGFTPEEMVVLLAGGHSI |
| | | GKVRCIFIEPDATPMDPGYQASISKLCDGPNRDTGFVNMDEHNPNVIDSSYFANVLAKKMPLTVDRLLGLDSKTTPIIKNMLNKPNDFMPT |
| | | FAKAMEKLSVLKAIPGKDGEIRKSCSEFNNPMPSTGGSVIRISSANPEDLEGLSSGGTQVAGIVSQGTKDPWHVKTLKAAGAARPKKVTGR |
| | | HPKLRGAHPQ |
| 52 | M.505 | LLGLLAPLASAQLSREFYKASCPDAEKIVAAVIEKKLKEDPGTAAGLLRLLFHDCFANGCDASILIDPLSNQSAEKEAGPNISVRGFEVID |
| | | DIKKELEAKCPKTVSCADIVALGTRDAVRISGGPAYEVPTGRRDSLVSNREEADNNLPGPDIPIPKLTSEFLSRGFTPEEMVVLLAGGHSI |
| | | GKVRCIFIEPDATPMDPGYQASISKLCDGPNRDTGFVNMDEHNPN |
| 52 | M.488 | ..................KASCPDAEKIVAAVIEKKLKEDPGTAAGLLRLLFHDCFANGCDASILIDPLSNQSAEKEAGPNISVRGFEVID |
| | | DIKKELEAKCPKTVSCADIVALGTRDAVRISGGPAYEVPTGRRDSLVSNREEADNNLPGPDIPIPKLTSEFLSRGFTPEEMVVLLAGGHSI |
| | | GKVRCIFIEPDATPMDPGYQASISKLCDGPNRDTGFVNMDEHNPNVIDSSYF |
| 52 | M.445 | ..................................................LFHDCFANGCDASILIDPLSNQSAEKEAGPNISVRGFEVID |
| | | DIKKELEAKCPKTVSCADIVALGTRDAVRISGGPAYEVPTGRRDSLVSNREEADNNLPGPDIPIPKLTSEFLSRGFTPEEMVVLLAGGHSI |
| | | GKVRCIFIEPDATPMDPGYQASISKLCDGPNRDTGFVNMDEHNPN |
| 53 | M.436 | WSEIQTLKPNLIGPFAAAGMDRNPVAKNAGKFMTLAGFLDYAKASNISGILIGIEHAAYLATRGLDVVDAVSNALIKSGYDKETKQQVFIQ |
| | | SEDPPVLSAFKKFPKFNRVFEIEFDIRDVSKPSVVEIKEFANAVKLRRSSAAQVDGFYLTGFNAVVERLRDADIQVHVGVL |
| 53 | M.508 | ...IQTLKPNLIGPFAAAGMDRNPVAKNAGKFMTLAGFLDYAKASNISGILIGIEHAAYLATRGLDVVDAVSNALIKSGYDKETKQQVFIQ |
| | | SEDPPVLSAFKKFPKFNRVFEIEFDIRDVSKPSVVEIKEFANAVKLRRSSAAQVDGFYLTGFNAVVERLRDADIQVHVGVLKNEFMSLAFD |
| | | YWADPMVEIATDTWSVLADGLVTEFPSTAAAYFSKWWYLLLDQRTV |
| 53 | M.688 | ..EIQTLKPNLIGPFAAAGMDRNPVAKNAGKFMTLAGFLDYAKASNISGILIGIEHAAYLATRGLDVVDAVSNALIKSGYDKETKQQVFIQ |
| | | SEDPPVLSAFKKFPKFNRVFEIEFDIRDVSKPSVVEIKEFANAVKLRRSSAAQVDGFYLTGFNAVVERLRDADIQVHVGVLKNEFMSLAFD |
| | | YWADPMVEIATDTWSVLADGLVTEFPSTAAAYFRSPCSDIKRNMSYTIKPGPGALVDMAAYGALPPAPPPAPVLEPADVHRQPLPLCPTE |
| | | PMFRTFRCRLPPKETGKNAEYTANLAADG |
| 53 | M.613 | .SEIQTLKPNLIGPFAAAGMDRNPVAKNAGKFMTLAGFLDYAKASNISGILIGIEHAAYLATRGLDVVDAVSNALIKSGYDKETKQQVFIQ |
| | | SEDPPVLSAFKKFPKFNRVFEIEFDIRDVSKPSVVEIKEFANAVKLRRSSAAQVDGFYLTGFNAVVERLRDADIQVHVGVLKNEFMSLAFD |
| | | YWADPMVEIATDTWSVLADGLVTEFPSTAAAYFRSPCSDIKRNMSYTIKPGPGALVDMAAYGALPPAPPPAPVLEPADVHRQPLPLCPTE |
| | | PMFRTFRCRLPPKETGKNAEYTANLAADG |
| 53 | M.487 | .SEIQTLKPNLIGPFAAAGMDRNPVAKNAGKFMTLAGFLDYAKASNISGILIGIEHAAYLATRGLDVVDAVSNALIKSGYDKETKQQVFIQ |
| | | SEDPPVLSAFKKFPKFNRVFEIEFDIRDVSKPSVVEIKEFANAVKLRRSSAAQVDGFYLTGFNAVVERLRDADIQVHVGVLKNEFMSLAFD |
| | | YWADPMVEIATDTWSVLADGLVTEFPSTAAAYF |
| 53 | M.552 | ..............................................ISGILIGIEHAAYLATRGLDVVDAVSNALIKSGYDKETKQQVFIQ |
| | | SEDPPVLSAFKKFPKFNRVFEIEFDIRDVSKPSVVEIKEFANAVKLRRSSAAQVDGFYLTGFNAVVERLRDADIQVHVGVLKNEFMSLAFD |
| | | YWADPMVEIATDTWSVLADGLVTEFPSTAAAYFRSPCSDIKRNMSYTIKPGPGALVDMAAYGALPPAPPPAPVLEPADVHRQPLPLCPTE |
| | | PMFRTFRCRLPPKETGKNAEYTANLAADG |
| 53 | M.572 | .......................................................HAAYLATRGLDVVDAVSNALIKSGYDKETKQQVFIQ |
| | | SEDPPVLSAFKKFPKFNRVFEIEFDIRDVSKPSVVEIKEFANAVKLRRSSAAQVDGFYLTGFNAVVERLRDADIQVHVGVLKNEFMSLAFD |
| | | YWADPMVEIATDTWSVLADGLVTEFPSTAAAYFRSPCSDIKRNMSYTIKPGPGALVDMAAYGALPPAPPPAPVLEPADVHRQPLPLCPTE |
| | | PMFRTFRCRLPPKETGKNAEYTANLAADG |
| 53 | M.336 | ................................................................LDVVDAVSNALIKSGYDKETKQQVFIQ |
| | | SEDPPVLSAFKKFPKFNRVFEIEFDIRDVSKPSVVEIKEFANAVKLRRSSAAQVDGFYLTGFNAVVERLRDADIQVHVGVLKNEFMS |
| 53 | M.534 | WSEIQTLKPNLIGPFAAAGMDRNPVAKNAGKFMTLAGFLDYAKASNISGILIGIEHAAYLATRGLDVVDAVSNALIKSGYDKETKQQVFIQ |
| | | SEDPPVLSAFKKFPKFNRVFEIEFDIRDVSKPSVVEIKEFANAVKLRRSSAAQVDGFYLTGFNAVVERLRDADIQVHVGVLKNEFMSLAFD |
| | | YWADPMVEIATDTWSVLADGLVTEFPSTAAAYFRSPCSDIKRNMSYTIKPGPGALVDMAAYGALPPAPP |
| 54 | M.213 | ...................................................................DGLPGTNCPVAPGTNFTYKWQPKD |
| | | QTGSFFYFPSTGMQRTVGGYGLTSVVSRLLTPVPFDPPADDLQVIIGDWYTKD |
| 54 | M.384 | HVPLEEHVGTKTTVLGVPQKVTLINGEFPGPRINCSSNNNIVVNVFNQLDQPLLFTWNGTQHRKNSWQDGLPGTNCPVAPGTNFTYKWQPKD |
| | | QTGSFFYFPSTGMQRTVGGYGLTSVVSRLLTPVPFDPPADDLQVIIGDWYTKDH |
| 54 | M.220 | ...................................................................DGLPGTNCPVAPGTNFTYKWQPKD |
| | | QTGSFFYFPSTGMQRTVGGYGLTSVVSRLLTPVPFDPPADDLQVIIGDWYTKDH |
| 54 | M.147 | ............................................................................VAPGTNFTYKWQPKD |
| | | QTGSFFYFPSTGMQRTVGGYGLTSVVSRLLTPVPFDPP |
| 54 | M.127 | ................................................................................TNFTYKWQPKD |
| | | QTGSFFYFPSTGMQRTVGGYGLTSVVSRLLTPVPFDPPADDLQVIIGDWYTKDH |
| 54 | M.145 | ................................................................................TNFTYKWQPKD |
| | | QTGSFFYFPSTGMQRTVGGYGLTSVVSRLLTPVPFDPPADDLQVIIGDWYTKDHTV |
| 55 | M.33 | ...................PKFRRVLVIDPVISGASKPSIGEIKGFADAVMVSRGSLVRVNGFFLT |
| 55 | M.110 | ..........SVLSVFKKFPKFRRVLVIDPVISGASKPSIGEIKGFADAVMVSRGSLVRVNGFFLT |
| 55 | M.173 | ..VFIQSDDSSVLSVFKKFPKFRRVLVIDPVISGASKPSIGEIKGFADAVMVSRGSLVRVNGFFPT |
| 55 | M.50 | ..........LNTESTEEFPKFRRVLVIDPVISGASKPSIGEIKGFADAVMVSRGSLVRVNGFFLT |
| 55 | M.249 | QQVFIQSDDSSVLSVFKKFPKFRRVLVIDPVISGASKPSIGEIKGFADAVMVSRGSLVRVNGFFLTGFNDLVIEIHDANLSLH |
| 55 | M.18 | ...............TEEFPKFRRVLVIDPVISGASKPSIGEIKGFADAVMVSRGSLVRVNGFF |
| 56 | M.5 | .........RQPGPLPGLNTKIASFLDPDGWKVVLVDHADFLKELH |
| 56 | M.25 | TKELGGKTLRQPGPLPGLNTKIASFLDPDGWKVVLVDHADFLKELH |
| 57 | M.394 | ILQDNAKTVQIDSSTQARTVGAGSGGFSRIVCLRVHPTFTLLHPTEVVVAFTATNGSRQEVSPESGEVTLEGDTRPNGEWMLVDKCAGVAL |
| | | VNRFEISQVQVSKCLVRWGTGDLNMELWSEEPVSKDTPLRICHQYELRQTS |
| 58 | M.329 | .VRTTDSRCMDLADPCSEYFVEAYLNNPLVQKAIHANTALNYPWTGCRTRTYNLRRFGDSPPSMLAHIKALVTTGIRIWLYSGELYAMVPV |
| | | TASKHSWKKLRLEVVKDWRPW |
| 58 | M.330 | ..........DLADPCSEYFVEAYLNNPLVQKAIHANTALNYPWTGCRTRTYNLRRFGDSPPSMLAHIKALVTTGIRIWLYSGELYAMVPV |
| | | TASRHSVEKLRLEVVKDWRPWSTAPGQDV |
| 58 | M.345 | ...........................NPLVQKAIHANTALNYPWTGCRTRTYNLRRFGASPPSMLAHIKALVTTASASGCTAATWTRWCP |
| 58 | M.323 | ...........................NPLVQKAIHANTALNYPWTGCRTRTYNLRRFGASPPSMLAHIKALVTTASASGCTAATWTRWCP |
| 58 | M.316 | .........................NNPLVQKAIHANTALNYPWTGCRTRTYNLRRFGDSPPSMLAHIKALVTTGIRIWLYSGDLDAMVPV |
| | | TASKHSVEKLRLEVVKDWRPWSIAPGQDVGGYVIEYKGLV |
| 58 | M.130 | .........................NNPLVQKAIHANTALNYPWTGCRTRTYNLRRFGDSPPSMLAHIKALVTIGIRSPLYSQMRMRWCP |
| 58 | M.131 | .........................NNPLVQKAIHANTALNYPWTGCRTRTYNLRRFGDSPPSMLAHIKALVTIGIRSPLYSQMRMRWCP |
| 58 | M.203 | KVRITDSRCMDLADPCSEYFVEAYLNNPLVQKAIHANTALNYPWIGCRTRTYNLRRFGDSPPSMLAHIKALVTTGI |
| 58 | M.227 | ................................AIHANTALNYPWTGCRTRTYNLRRFGDSPPSMLAHIKVLVTTGIRIWLYSGDLDAMVPV |
| | | TASKHSVEKLRLEVVKDWRP |
| 58 | M.128 | ...............................KAIHANTALNYPWTGCRTRTYNLRRFGDSPPSMLAHIKVLVTTGIRIWLYSGDLDAMVPV |
| | | TASKHS |
| 58 | M.70 | ..............................QKAIHANTALNYPWTGCRTRTYNLRRFGDSPPSMLAHIKALVTTGIRIWLYSGDLGAMV |
| 58 | M.292 | ............................QKAIHANTALNYPWTGCRTRTYNLPRFGDSPPSMLAHIKALVTTGIRIWLYSGDLGAMVPV |
| | | TASKHSVEKLRLEVVKDWRPWSTAPGQQVGGYVIEYK |
| 59 | M.526 | ........................................................................................... |
| | | .............................................................ACIGEILEQREAGTIMEVVAAQTKAIAEKI |
| | | SDWINVVLAYEPVWAIGTGKVASRAQAQEVHDGLRKWLHANVGPAVAESTRIIYGGSVNGANCKELAAQPDLDGFLVGGASLKPEFVDIIK |
| | | SATVKSSSA |
| 59 | M.585 | ............PHTASDSPHRADQPMAPRKFFVGGNWKCNGASDDVKKIATVLNEAEVPSEDAVEVVVSPPVFLQQAKALLAPDFAVAA |
| | | QNCWVRKGGAFTGEISAEMLVNLQVPWVILGHSERRALLSESNDFVADKVAYALAQGLKVIACIGETLEQREAGTTMEVVAAQTKAIAEKI |
| | | SDWTNVVLAYEPVWAIGTGKVASRAQAQEVHDGLRKWLHANVGPAVAESTRIIYGGSVNGANCKELAAQPDLDGFLVGGASLKPEFVDIIK |
| | | SATVKSSSA |
| 59 | M.681 | ............PHTASDSPHRADQPMAPRKFFVGGNWKCNGASDDVKKIATVLNEAEVPSEDAVEVVVSPPVFLQQAKALLARPDFAVAA |
| | | QNCWVRKGGAFTGEISAEMLVNLQVPWVILGHSERRALLSESNDFVADKVAYALAQGLKVIACIGETLEQREAGTTMEVVAAQTKAIAEKI |
| | | SDWTNVVLAYEPVWAIGTGKVASRAQAQEVHDGLRKWLHANVGPAVAESTRIIYGGSVNGANCKELAAQPDLDGFLVGGASLKPEFVDIIK |
| | | SATVKSSSA |
| 59 | M.885 | ............PHTASDSPHRADQPMAPRKFFVGGNWKCNGASDDVKKIATVLNEAEVPSEDAVEVVVSPPVFLQQAKALLARPDFAVAA |
| | | QNCWVRKGGAFTGEISAEMLVNLQVPWVIGLHSERRALLSESNDFVADKVAYALAQGLKVIACIGETLEQREAGTTMEVVAAQTKAIAEKI |
| | | SDWTNVVLAYEPVWAIGTGKVASRAQAQEVHDGLRKWLHANVGPAVAESTRIIYGGSVNGANCKELAAQPDLDGFLVGGASLKPEFVDIIK |
| | | SATVKSSSA |
| 59 | M.596 | ..........................MAPRKFFVGGNWKCNGTSDDVKKIVTVLNEAEVPSEDAVEVVVSPPFVFLQQAKALLRPDFAVAA |
| | | QNCWVRKGGAFTGEISAEMLVNLQVPWVILGHSERRALLSESNDFVADKVAYALAQGLKVIACIGETLEQREAGTTMEVVAAQTKAIAEKI |
| | | SDWTNVVLAYEPVWAIGTGKVASRAQAQEVHDGLRKWLHANVGPAVAESTRIIYGGSVNGANCKELAAQPDLDGFLVGGASLKPEFVDIIK |
| | | SATVKSSSA |
| 59 | M.660 | .......................................MQNGTSDDVKKIVTVLNEAEVPSEDAVEVVVSPPFVFLQQAKALLRPDFAVAA |
| | | QNCWVRKGGAFTGEISAEMLVNLQVPWVILGHSERRALLSESNDFVADKVAYALAQGLKVIACIGETLEQREAGTTMEVVAAQTKAIAEKI |
| | | SDWTNVVLAYEPVWAIGTGKVASRAQAQEVHDGLRKWLHANVGPAVAESTRIIYGGSVNGANCKELAAQPDLDGFLVGGASLKPEFVDIIK |
| | | SATVKSSSA |
| 59 | M.674 | ...........RPHTASDSPHRADQPMAPRKFFVGGNWKCNGASDDVKKIVTVLNEAEVPSEDAVEVVVSPPFVFLQQAKALLRPDFAVAA |
| | | QNCWVRKGGAFTGEISAEMLVNLQVPWVILGHSERRALLSESNDFVADKVAYALAQGLKVIACIGETLEQREAGTTMEVVAAQTKAIAEKI |
| | | SDWTNVVLAYEPVWAIGTGKVASRAQAQEVHDGLRKWLHANVGPAVAESTRIIYGGSVNGANCKELAAQPDLDGFLVGGASLKPEFVDIIK |
| | | SATVKSSSA |
| 59 | M.703 | ...........RPHTASDSPHRADQPMAPRKFFVGGNWKCNGASDDVKKIVTVLNEAEVPSEDAVEVVVSPPFVFLQQAKALLRPDFAVAA |
| | | QNCWVRKGGAFTGEISAEMLVNLQVPWVILGHSERRALLSESNDFVADKVAYALAQGLKVIACIGETLEQREAGTTMEVVAAQTKAIAEKI |
| | | SDWTNVVLAYEPVWAIGTGKVASRAQAQEVHDGLRKWLHANVGPAVAESTRIIYGGSVNGANCKELAAQPDLDGFLVGGASLKPEFVDIIK |
| | | SATVKSSSA |
| 59 | M.504 | ..................................................................VVSPPFVFLQQAKALLRPDFAVAG |
| | | QNCWVRKGGAFTGEISAEMLVNLQVPWVILGHSERRALLSESNDFVADKVAYALAQGLKVIACIGETLEQREAGTTMEVVAAQTKAIAEKI |
| | | SDWTNVVLAYEPVWAIGTGKVASRAQAQEVHDGLRKWLHANVGPAVAESTRIIYGGSVNGANCKELAAQPDLDGFLVGGASLKPEFVDIIK |
| | | SATVKSSSA |
| 60 | M.515 | .....................................................................GGTWTRHSGPVKGGKSWIAFIE |
| | | DPDGYKFELIERGPTPEPLCQVMLRVGDLDRAIKFYEKAFGMELLRRKDNPQYKYTIAMMGYGPEDKNAVLETYNYGVKEYDKGNAYAQI |
| | | AIGTDDVYKTAEVVRQNGGQITREPGPLPGISTKITACTDPDGWKSVFVDNLDFLKELEE |
| 60 | M.521 | ......................................................................................IAFIE |
| | | DPDGYKFELIERGPTPEPLCQVMLRVDGLDRAIKFYEKAFGMELLRRKDNPQYKYTIAMMGYGPEDKNAVLELTYNYGVKEYDKGNAYAQI |
| | | AIGTDDVYKTAEVVRQNGGQITREPGPLPGISTKITACTDPDGWKSVFVDNLDFLKELEE |
| 60 | M.493 | ......................................................................................IAFIE |
| | | DPDGYKFELIERGPTPEPLCQVMLRVDGLDRAIKFYEKAFGMELLRRKDNPQYKYTIAMMGYGPEDKNAVLELTYNYGVKEYDKGNAYAQI |
| | | AIGTDDVYKTAEVVRQNGGQITREPGPLPGISTKITACTDPDGWKSVFVDNLDFLKELEE |
| 60 | M.497 | ......................................................................................IAFIE |
| | | DPDGYKFELIERGPTPEPLCQVMLRVDGLDRAIKFYEKAFGMELLRRKDNPQYKYTIAMMGYGPEDKNAVLELTYNYGVKEYDKGNAYAQI |
| | | AIGTDDVYKTAEVVRQNGGQITREPGPLPGISTKITACTDPDGWKSVFVDNLDFLKELEE |
| 60 | M.509 | LGMRLLRKRDIPEENYTNAFLGYGPEDSHFVVELTYNYGVESYDIGSGFGHFGIAVEDVELTVELIRAKGGTVTREPGPVKGGRSVIAFIE |
| | | DPDGYKFELIERGPTPEPLCQVMLRVGDLDRAIKFYEKAFGMELLRRKDNPQYKYTIAMMGYGPEDKNAVLELIYNYGVKEYDKGNAYAQI |
| | | AIGTDDVYKTAEVVRQNGGQITREPGPLPGISTKITACTDPAIWICAGS |
| 60 | M.533 | ....................................................FGIAVEDVEKTVELIKAKGGTVIREPGPVKGGKSVIAFIE |
| | | DPDGYKFELIERGPTPEPLCQVMLRVGDLDRAIKFYEKAFGMELLRRKDNPQYKYTIAMMGYGPEDKNAVLELTYNYGVKEYDKGNAYAQI |
| | | AIGTDDVYKTAEVVRQNGGQITREPGPLPGISTKITACTDPDGWKSVFVDNLDFLKELEE |
| 60 | M.484 | ....................................................FGIAVEDVEKTVELIKAKGGTVIREPGPVKGGKSVIAFIE |
| | | DPDGYKFELIERGPTPEPLCQVMLRVGDLDRAIKFYEKAFGMELLRRKDNPQYKYTIAMMGYGPEDKNAVLELTYNYGVKEYDKGNAYAQI |
| | | AIGTDDVYKTAEVVRQNGGQITREPGPLPGISTKITACTDPDGWKSVFVDNLDFLKELEE |
| 60 | M.302 | ...................................................................................KSVIAFIE |
| | | DPDGYKFELIERGPTPEPLCQVMLRVGDLDRAIKFYEKAFGMELLRRKDNPQYKYTIAMMGYGPEDKNAVLELTYNYGVKEYDKGNAYAQV |
| | | DI |
| 61 | M.478 | LQSRNCIDILCSIMICNGKVSKVLNTYIFLILYLEHI |
| 62 | M.222 | ................................................................QSKQMANPTTAAGVLRIFFRDCFVSGC |
| | | DASVLIAPTHYAKSEKDADINHSLPGDAFDAVVRSKLALELECPGVVSCADI |
| 62 | M.691 | PKSHTRVGSTYQPAAMRRLSLILLAAAALLAAAVSAEPGPAPKLSPDFYSQTCPRAERIIAEVVQSKQMANPTTAAGVLRVFFHDCFVSGC |
| | | DASVLIAPTHYAKSEKDADINHSLPGDAFDAVVRSKLALELECPGVVSCADILAIASRVLVTMTGGPRYPVPLGRKDSLSSNPAAPDVELP |
| | | HSNFTVGRIIELFTAKGFTVQEMVALSGAHTLGFSRCQETASRIYNYRDKGGKPAPFDPSMNPIYAKGLQAACQDYCKDPTIAAFNDIMTP |
| | | GKFDNIYSVNIERGLGLLSTDEDMWSDMRTKPFVQRYAANNTDFFEDFANAIEHLSMYGVKIGADGEIRRRCDAFNSGPNIQ |
| 62 | M.570 | ...............MRRLSLILLAAAALLAAAVSAEPGPAPKLSPDFYSQTCPRAERIIAEVVQSKQMANPTTAAGVLRVFFHDCFVSGC |
| | | DASVLIAPTHYAKSEKDADINHSLPGDAFDAVVRSKLALELECPGVVSCADILAIASRVLVTMTGGPRYPVPLGRKDSLSSNPAAPDVELP |
| | | HSNFTV |
| 62 | M.119 | ..........................................................................AAGVLRVFFHDCFVSGC |
| | | DASVLIAPTHYAKSEKDADINHSLPGDAFDAVVRSKLALELECPGVV |
| 62 | M.535 | PKSHTRVGSTYQPAAMRRLSLILLAAAALLAAAVSAEPGPAPKLSPDFYSQTCPRAERIIAEVVQSKQMANPTTAAGVLRVFFHDCFVSGC |
| | | DASVLIAPTHYAKSEKDADINHSLPGDAFDAVVRSKLALELECPGVVSCADILAIASRVLVTMTGGPRYPVPLGRKDSLSSNPAAPDVELP |
| | | HSNFTVGRIIELFTAKGFTVQEMVALSGAHTL |
| 62 | M.543 | PKSHTRVGSTYQPAAMRRLSLILLAAAALLAAAVSAEPGPAPKLSPDFYSQTCPRAERIIAEVVQSKQMANPTTAAGVLRVFFHDCFVSGC |
| | | DASVLIAPTHYAKSEKDADINHSLPGDAFDAVVRSKLALELECPGVVSCADILAIASRVLVTMTGGPRYPVPLGRKDSLSSNPAAPDVELP |
| | | HSNFTVGRIIELFTAKGFTVQEMVALSGAHTL |
| 62 | M.528 | PKSHTRVGSTYQPAAMRRLSLILLAAAALLAAAVSAEPGPAPKLSPDFYSQTCPRAERIIAEVVQSKQMANPTTAAGVLRVFFHDCFVSGC |
| | | DASVLIAPTHYAKSEKDADINHSLPGDAFDAVVRSKLALELECPGVVSCADILAIASRVLVTMTGGPRYPVPLGRKDSLSSNPAAPDVELP |
| | | HSNFTVGRIIELFTAKGFTVQEMVALSGAHT |
| 62 | M.529 | PKSHTRVGSTYQPAAMRRLSLILLAAAALLAAAVSAEPGPAPKLSPDFYSQTCPRAERIIAEVVQSKQMANPTTAAGVLRVFFHDCFVSGC |
| | | DASVLIAPTHYAKSEKDADINHSLPGDAFDAVVRSKLALELECPGVVSCADILAIASRVLVTMTGGPRYPVPLGRKDSLSSNPAAPDVELP |
| | | HSNFTVGRIIELFTAKGFTVQEMVALSGAHTLG |
| 62 | M.373 | .................................................................................FFHDCFVSGC |
| | | DASVLIAPTHYAKSEKDADINHSLPGDAFDAVVRSKLALELECPGVVSCADILAIASRVLVTMTGGPRYPVPLGRKDSLSSNPAAPDVELP |
| | | HSNFTVGRIIELFTAKGFTVQEMVALSGAHTLG |
| 62 | M.590 | PKSHTRVGSTYQPAAMRRLSLILLAAAALLAAAVSAEPGPAPKLSPDFYSQTCPRAERIIAEVVQSKQMANPTTAAGVLRVFFHDCFVSGC |
| | | DASVLIAPTHYAKSEKDADINHSLPGDAFDAVVRSKLALELECPGVVSCADILAIASRVLVTMTGGPRYPVPLGRKDSLSSNPAAPDVELP |
| | | HSNFTVGRIIELFTAKGFTVQEMVALSGAHTLGFSRCQETASRIYNYRDKGGKPAPFDPSMNPIYAKGLQAACQDYCKDPTIAAFNDIMSS |
| | | SVLEEP |
| 63 | M.361 | .....PHMLLILLLLHGANAALDEPVQKWQTLDGSPPLVIARGGFSGLFPESSLYAYQFAMSNGLPDVVLHCDLQLSSDGKGFCRSGLRLD |
| | | KSTLIAEVFPKRDKTYKLGTEDIHGWFAVDFTAAELVNNVT |
| 63 | M.432 | MGGRYPHMLLILLLLHGANAALDEPVQKWQTLDGSPPLVIARGGFSGLFPESSLYAYQFAMSNGLPDVVLHCDLQLSSDGKGFCRSGLRLD |
| | | KSTLIAEVFPKRDKTYKLGTEDIHGWFAVDFTAAELVNNVT |
| 63 | M.477 | MGGRYPHMLLILLLLHGANAALDEPVQKWQTLDGSPPLVIARGGFSGLFPESSLYAYQFAMSNGLPDVVLHCDLQLSSDGKGFCRSGLRLD |
| | | KSTLIAEVFPKRDKTYKLGTEDIHGWFAVDFTAAELVNNVTGMHPKLSNLL |
| 63 | M.408 | MGGRYPHMLLILLLLHGANAALDEPVQKWQTLDGSPPLVIARGGFSGLFPESSLYAYQFAMSNGLPDVVLHCDLQLSSDGKGFCRSGLRLD |
| | | KSTLIAEVFPKRDKTYKLGTEDIHGWFAVDFTAAELVNNVT |
| 64 | M.568 | .HAANAGLGMLEPIKEEIPTISYSDLYQLAGVVAVEVSGGPVIPFHPGREDKPQPPPEGRLPDATKGSDHLRQVFGKQMGLSDQDIVALSG |
| | | GHTLGRCHKERSGFEGPWTKNPLKFDNTYFTELLSGDKEGLIQLPSDKTLLTDPVFRPLVEKYAADEKAFFEDYKEAHLRLSELGYAEA |
| 64 | M.589 | AHAANAGLGMLEPIKEEIPTISYSDLYQLAGVVAVEVSGGPVIPFHPGREDKPQPPPEGRLPDATKGSDHLRQVFGKQMGLSDQDIVALSG |
| | | GHTLGRCHKERSGFEGPWTKNPLKFDNTYFTELLSGDKEGLIQLPSDKTLLTDPVFRPLVEKYAADEKAFFEDYKEAHLRLSELGYAEA |
| 64 | M.462 | ..........................................................................................G |
| | | GHTLGRCHKERSGFEGPWTKNPLKFDNTYFTELLSGDKEGLIQLPSDKTLLTDPVFRPLVEKYAADEKAFFEDYKEAHLRLSELGYAEA |
| 64 | M.516 | ...............................................NLQDNPQPPPEGRLPDATKGSDHLRQVFGKQMGLSDQDIVALSG |
| | | GHTLGRCHKERSGFEGPWTKNPLKFDNTYFTELLSGDKEGLIQLPSDKTLLTDPVFRPLVEKYAADEKAFFEDYKEAHLRLSELGYAEA |
| 64 | M.522 | ...............................................................PQEGVDHLRQVFGKQMGLSDQDIVALSG |
| | | GHTLGRCHKERSGFEGPWTKNPLKFDNTYFTELLSGDKEGLIQLPSDKTLLTDPVFRPLVEKYAADEKAFFEDYKEAHLRLSELGYAEA |
| 64 | M.412 | ...............................................................PQEGVDHLRQVFGKQMGLSDQDIVALSG |
| | | GHTLGRCHKERSGFEGPWTKNPLKFDNTYFTELLSGDKEGLIQLPSDKTLLTDPVFRPLVEKYAADEKAFFEDYKEAHLRLSELGYAEA |
| 65 | M.4 | .................................................RVQVVGPDGKRVLETRIEGGSLFIVPRFHVVSKIADASGMEW |
| 65 | M.255 | KEVGLGADLVRIDAHSNCSPGFSCDSAYQVTYIVRGSGRVQVVGPDGKRVLETRIEGGSLFIVPRFHVVSKIADASGMEWFSII |
| 65 | M.56 | ......................................RVQVVGPDGKRVLETRIEGGSLFIVPRFHVVSKIADASGMEWFSIITTPNPIF |
| | | SHLA |
| 65 | M.55 | ...............................YIVRGSGRVQVVGPDGKRVLETRIEGGSLFIVPRFHVVSKIADASGMEWFSIITTP |
| 65 | M.64 | ...........................YQVTYIVRGSGRVQVVGPDGKRVLETRIEGGSLFIVPRFHVVSKIADASGMEWFSIITT |
| 65 | M.22 | ...................................GSGRVQVVGPDGKRVLETRIEGGSLFIVPRFHVVSKIADASGMEWFSIITT |
| 65 | M.148 | .......................CDSAYQVTYIVRGSGRVQVVGPDGKRVLETRIEGGSLFIVPRFHVVSKIADASGMEWFSIITTPNPI |
| 65 | M.205 | ...............SMCSPGFSCDSAYQVTYIVRGSGRVQVVGPDGKRVLETRIEGGSLFIVPRFHVVSKIADASGMEWFSIITTPNPI |
| 65 | M.332 | ...................PGFSCDSAYQVTYIVRGSGRVQVVGPDGKRVLETRIEGGSLFIVPRFHVVSKIADASGMEWFSIITTPNPIF |
| | | SHLAGKTSVWKAISPEVLEASFNTTPEMEKLFRSKRLDSEI |
| 65 | M.171 | ...........IDAHSMCSPGFSCDSAYQVIYIVRGSGRVQVVGPDGKRVLETRIEGGSLFIVPRFHVVSKIADASGMEWF |
| 66 | ME.3566 | PPRSCRGRCPCSLRTPAWGSCSRMAPCNCRCPCSTRGARRRLPGRTSS |
| 67 | ME.4276 | AISPTIRITAPISRRSPSAPSPHTSPPPRASATTSSRDGTTRTCISTRRIPSRPTTSPWSTCRAARSPTPSATSASREPTPRPSRSSDTSS |
| | | RRSLDRREIWLSEMVAWVGLQLAFWIQWQH |
| 67 | ME.4056 | ..SPTIRITAPISRRSPSAPSPHTSPPPRASATTSSRDGTTRTCISTRRIPSRPTTSPWSTCRAARSPTPSATSASREPTPRPSRSSDTSS |
| | | RRSLDRREIWLSEMVAWVGLQLAFWIQWQH |
| 68 | ME.3805 | SSCSRRCPWRPPRRWSCCPLPWPGTRRWWFRCHQPPSSRTAPGSSRSLYGSPSTSC |
| 68 | ME.3720 | SSCSRRCPWRPPRRWSCCPLPWPGTRRWWFRCHQPPSSRTAPGSSRSLYGSPSTSC |
| 69 | ME.3916 | VKVAPAALVNVLEARSALTISVLRISSMPFSVYHSGKSFSPPLPTQVWNPGSLAAFWGKRYPLLSAGRSYGATDSLEMMASSPGWTPCLAN |
| | | SLA |
| 70 | ME.3855 | SSPSCAPESTHAVRALPSTHTARILLRSTTANVSGCKDRYERPS |
| 71 | ME.1412 | QVQVPGGHQGDLPRGEGVQPQLPGAAGEVCRPRRRRGGGGHQGEGQGQVDRAQGVVGSHLEDRHSRQAHRPLHRPLH |
| 72 | ME.4234 | FAAISNAKHLIYVTGWSVYTEITLLRDANRPKPAGGTVTLGELLKKKASEGVRVLMLVWDDRTSVGVLKKDGLMATHDEETMNYFQDTDVH |
| | | CVLCPRDPDDSGSIVQDLQISTMFTHHQKIVVVDHDMPQPQSASRRRRIMSFVGGLDLCDGRYDTPFHSVFGTLDGAHHDDFHQPNFATSA |
| | | ITKGGPREPWHDIHCRLEGPVAWDVLYNFEQRWRKQGGKDLLIQLRDLADEIIPPSPVVYAEDREAWNVQLFRSIDGGAAFGFPDTPEDAA |
| | | RAGLVSGKDQIIDRSIQDAYICTIRRAKSFIYIENQYFLGSSYCWKPDGIKPDDVGALHLIPKELSMKVVSKIEAGERFTVYVVVPMWPEG |
| | | IPASGSVQAILDWQRRTMEMMYTDIAQAIQAKGIDANPKDYLTFFCLGNREAKKAGEYEPPEPAEPDSDYLKAQQNRRFMIYVHTKMMIVD |
| | | DEYIIVGSANINQRSMDGARDSEIAMGAYQPYHLAASRPARGQVHGFRMALWYEHLGMVDEAFQRPESVECVRKVNAMADRYWNLYAGDGP |
| | | ERDLPGHLLTYPVGVTSDGTVTQLPGVEFFPDTQARILGAKSDYLPPILTT |
| 72 | ME.4088 | ........................................................................................... |
| | | ..................................................................................HQPNFATAA |
| | | ITKGGPREPWHDIHCRLEGPVAWDVLYNFEQRWRKQGGKDLLIQLRDLADEIIPPSPVVYAEDREAWNVQLFRSIDGGAAFGFPDTPEDAA |
| | | RAGLVSGKDQIIDRSIQDAYICAIRRAKSFIYIENQYFLGSSYCWKPDGIKPDDVGALHLIPKELSMKVVSKIEAGERFTVYVVVPMWPEG |
| | | IPASGSVQAILDWQRRTMEMMYTDIAQAIQAKGIDANPKDYLTFFCLGNREAKKAGEYEPPEPAEPDSDYLKAQQNRRFMIYVHTKMMIVD |
| | | DEYIIVGSANINQRSMDGARDSEIAMGAYQPYHLAASRPARGQVHGFRMALWYEHLGMVDEAFQRPESVECVRKVNAMADRYWNLYAGDGP |
| | | ERDLPGHLLTYPVGVTSDGTVTQLPGVEFFPDTQARILGAKSDYLPPILTT |
| 72 | ME.4115 | ........................................................................................... |
| | | ........................................QSASRRRRIMSFVGGLDLCDGRYDTPFHSVFGTLDGAHHDDFHQPNFATSA |
| | | ITKGGPREPWHDIHCRLEGPVAWDVLYNFEQRWRKQGGKDLLIQLRDLADEIIPPSPVVYAEDREAWNVQLFRSIDGGAAFGFPDTPEDAA |
| | | RAGLVSGKDQIIDRSIQDAYICAIRRAKSFIYIENQYFLGSSYCWKPDGIKPDDVGALHLIPKELSMKVVSKIEAGERFTVYVVVPMWPEG |
| | | IPASGSVQAILDWQRRTMEMMYTDIAQAIQAKGIDANPKDYLTFFCLGNREAKKAGEYEPPEPAEPDSDYLKAQQNRRFMIYVHTKMMIVD |
| | | DEYIIVGSANINQRSMDGARDSEIAMGAYQPYHLAASRPARGQVHGFRMALWYEHLGMVDEAFQRPESVECVRKVNAMADRYWNLYAGDGP |
| | | ERDLPGHLLTYPVGVTSDGTVTQLPGVEFFPDTQARILGAKSDYLPPILTT |
| 72 | ME.4210 | ................................................SEGVRVLMLVWDDRTSVGVLKKDGLMATHDEETMNYFQDTDVH |
| | | CVLCPRDPDDSGSIVQDLQISTMFTHHQKIVVVDHDMPQPQSASRRRRIMSFVGGLDLCDGRYDTPFHSVFGTLDGAHHDDFHQPNFATAA |
| | | ITKGGPREPWHDIHCRLEGPVAWDVLYNFEQRWRKQGGKDLLIQLRDLADEIIPPSPVVYAEDREAWNVQLFRSIDGGAAFGFPDTPEDAA |
| | | RAGLVSGKDQIIDRSIQDAYICAIRRAKSFIYIENQYFLGSSYCWKPDGIKPDDVGALHLIPKELSMKVVSKIEAGERFTVYVVVPMWPEG |
| | | IPASGSVQAILDWQRRTMEMMYTDIAQAIQAKGIDANPKDYLTFFCLGNREAKKAGEYEPPEPAEPDSDYLKAQQNRRFMIYVHTKMMIVD |
| | | DEYIIVGSANINQRSMDGARDSEIAMGAYQPYHLAASRPARGQVHGFRMALWYEHLGMVDEAFQRPESVECVRKVNAMADRYWNLYAGDGP |
| | | ERDLPGHLLTYPVGVTSDGTVTQLPGVEFFPDTQARILGAKSDYLPPILTT |
| 72 | ME.3897 | .......................................................................................TDVH |
| | | CVLCPRDPDDSGSIVQDLQISTMFTHHQKIVVVDHDMPQPQSASRRRRIMSFVGGLDLCDGRYDTPFHSVFGTLDGAHHDDFHQPNFATAA |
| | | ITKGGPREPWHDIHCRLEGPVAWDVLYNFEQRWRKQGGKDLLIQLRDLADEIIPPSPVVYAEDREAWNVQLFRSIDGGAAFGFPDTPEDAA |
| | | RAGLVSGKDQIIDRSIQDAYICAIRRAKSFIYIENQYFLGSSYCWKPDGIKPDDVGALHLIPKELSMKVVSKIEAGERFTVYVVVPMWPEG |
| | | IPASGSVQAILDWQRRTMEMMYTDIAQAIQAKGIDANPKDYLTFFCLGNREAKKAGEYEPPEPAEPDSDYLKAQQNRRFMIYVHTKMMIVD |
| | | DEYIIVGSANINQRSM |
| 73 | ME.4229 | ........................................................................................... |
| | | ..PLLEGSGKLEVWCVDGSAKTALPKEDLGKFHSGDCYIVLYTYHSGEKREEFYLTYWIGKDSVLEDQHMALQIATTIWNSMKGRPVLGRI |
| | | YQGKEPPQFIALFQPMVILKGGISSGYKKSIEENGLKDETYSGTGIALVHIHGTSIHNNKTLQVDAVSISLSSTDCFVLQSGNSMFTWIGN |
| | | TSSYEQQQWAAKVAEFLKPGASVKHCKEGTESSAFWSALGGKQNYTSKNATQDVLREPHLYTFSFRNGKLEVTEVFNFSQDDLLTEDVMIL |
| | | DTHAEVFVWMGQCVDTKEKQTAFETGQKYVEHAVNFEGLSPDVPLYKVSEGNEPCFFRTYFSWDNTRSVIHGNSFQKKLSLLFGMRSESGS |
| | | KGSGDGGPTQRASALAALSSAFNPSSQDKQSNDRPKSSGDGGPTQRASALAALSSSLNPSSKPKSPHSQSRSGQGSQRAAAVAALSNVLTA |
| | | EGSTLSPRNDAEKTELAPSEFHTDQDAPGDEVPSEGERTEPDVSQEETANENGGETTFSYDRLISKSTDPVRGIDYKRRETYLSDSEFETV |
| | | FGVTKGGILPAAKVEAHIAEKKSRSFIRHSLLRTQRLHKFLVCSSMIGVMAHQKPMSGNLYMFQMQDHQLIYPLISPSFLVYSFFVRDLR |
| 73 | ME.4231 | ........................................................................................... |
| | | .PPLLEGSGKLEVWCVDGSAKTALPKEDLGKFHSGDCYIVLYTYHSGEKREEFYLTYWIGKDSVLEDQHMALQIATTIWNSMKGRPVLGRI |
| | | YQGKEPPQFIALFQPMVILKGGISSGYKKSIEENGLKDETYSGTGIALVHIHGTSIHNNKTLQVDAVSISLSSTDCFVLQSGNSMFTWIGN |
| | | TSSYEQQQWAAKVAEFLKPGASVKHCKEGTESSAFWSALGGKQNYTSKNATQDVLREPHLYTFSFRNGKLEVTEVFNFSQDDLLTEDVMIL |
| | | DTHAEVFVWMGQCVDTKEKQTAFETGQKYVEHAVNFEGLSPDVPLYKVSEGNEPCFFRTYFSWDNTRSVIHGNSFQKKLSLLFGMRSESGS |
| | | KGSGDGGPTQRASALAALSSAFNPSSQDKQSNDRPKSSGDGGPTQRASALAALSSSLNPSSKPKSPHSQSRSGQGSQRAAAVAALSNVLTA |
| | | EGSTLSPRNDAEKTELAPSEFHTDQDAPGDEVPSEGERTEPDVSQEETANENGGETTFSYDRLISKSTDPVRGIDYKRRETYLSDSEFETV |
| | | FGVTKEEFYQQPRWKQELQKRKADLF |
| 73 | ME.4280 | VGRVTQVDDRKAASAAVEEFIVKQNRPKTIRVTQVIQGYENHTFKSLFESWPVSSTGNASTEEGRGKVAALLKKKGDVKGASKNSTPVNEE |
| | | VPPLLEGSGKLEVWCVDGSAKTALPKEDLGKFHSGDCYIVLYTYHSGEKREEFYLTYWIGKDSVLEDQHMALQIATTIWNSMKGRPVLGRI |
| | | YQGKEPPQFIALFQPMVILKGGISSGYKKSIEENGLKDETYSGTGIALVHIHGTSIHNNKTLQVDAVSISLSSTDCFVLQSGNSMFTWIGN |
| | | TSSYEQQQWAAKVAEFLKPGASVKHCKEGTESSAFWSALGGKQNYTSKNATQDVLREPHLYTFSFRNGKLEVTEVFNFSQDDLLTEDVMIL |
| | | DTHAEVFVWMGQCVDTKEKQTAFETGQKYVEHAVNFEGLSPDVPLYKVSEGNEPCFFRTYFSWDNTRSVIHGNSFQKKLSLLFGMRSESGS |
| | | KGSGDGGPTQRASALAALSSAFNPSSQDKQSNDRPKSSGDGGPTQRASALAALSSSLNPSSKPKSPHSQSRSGQGSQRAAAVAALSNVLTA |
| | | EGSTLSPRNDAEKTELAPSEFHTDQDAPGDEVPSEGERTEPDVSQEETANENGGETTFSYDRLISKSTDPVRGIDYKRRETYLSDSEFETV |
| | | FGVTKEEFYQQPRWKQELQKRKADLF |
| 73 | ME.4281 | VGRVTQVDDRKAASAAVEEFIVKQNRPKTIRVTQVIQGYENHTFKSLFESWPVSSTGNASTEEGRGKVAALLKKKGDVKGASKNSTPVNEE |
| | | VPPLLEGSGKLEVWCVDGSAKTALPKEDLGKFHSGDCYIVLYTYHSGEKREEFYLTYWIGKDSVLEDQHMALQIATTIWNSMKGRPVLGRI |
| | | YQGKEPPQFIALFQPMVILKGGISSGYKKSIEENGLKDETYSGTGIALVHIHGTSIHNNKTLQVDAVSISLSSTDCFVLQSGNSMFTWIGN |
| | | TSSYEQQQWAAKVAEFLKPGASVKHCKEGTESSAFWSALGGKQNYTSKNATQDVLREPHLYTFSFRNGKLEVTEVFNFSQDDLLTEDVMIL |
| | | DTHAEVFVWMGQCVDTKEKQTAFETGQKYVEHAVNFEGLSPDVPLYKVSEGNEPCFFRTYFSWDNTRSVIHGNSFQKKLSLLFGMRSESGS |
| | | KGSGDGGPTQRASALAALSSAFNPSSQDKQSNDRPKSSGDGGPTQRASALAALSSSLNPSSKPKSPHSQSRSGQGSQRAAAVAALSNVLTA |
| | | EGSTLSPRNDAEKTELAPSEFHTDQDAPGDEVPSEGERTEPDVSQEETANENGGETTFSYDRLISKSTDPVRGIDYKRRETYLSDSEFETV |
| | | FGVTKEEFYQQPRWKQELQKRKADLF |
| 73 | ME.1571 | ........................................................................................... |
| | | ........................................................................................... |
| | | ........................................................................................... |
| | | ........................................................................................... |
| | | ........................................................................................... |
| | | ........................................................................................... |
| | | ..........................................................................DYKRRETYLSDSEFQTV |
| | | FGVTKEEFYQQPRWKQELQKRKADLF |
| 73 | ME.4190 | ........................................................................................... |
| | | ................................................................LEDQHMALQIATTIWNSMKGRPVLGRI |
| | | YQGKEPPQFIGLFQPMVILKGGISSGYKKSIEENGLKDETYSGTGIALVHIHGTSIHNNKTLQVDAVSISLSSTDCFVLQSGNSMFTWIGN |
| | | TSSYEQQQWAAKVAEFLKPGASVKHCKEGTESSAFWSALGGKQNYTSKNATQDVLREPHLYTFSFRNGKLEVTEVFNFSQDDLLTEDVMIL |
| | | DTHAEVFVWMGQCVDTKEKQTAFETGQKYVEHAVNFEGLSPDVPLYKVSEGNEPCFFRTYFSWDNTRSVIHGNSFQKKLSLLFGMRSESGS |
| | | KGSGDGGPTQRASALAALSSAFNPSSQDKQSNDRPKSSGDGGPTQRASALAALSSSLNPSSKPKSPHSQSRSGQGSQRAAAVAALSNVLTA |
| | | EGSTLSPRNDAEKTELAPSEFHTDQDAPGDEVPSEGERTEPDVSQEETANENGGETTFSYDRLISKSTDPVRGIDYKRRETYLSDSEFETV |
| | | FGVTKEEFYQQPRWKQELQKRKADLF |
| 74 | ME.4230 | ITNAERLIYQTANSRLCSVLPKEFEYQQPRWKQELQKRKADLF |
| 75 | ME.3882 | AIGAAAAMTTIRSTAIARPRAIV |
| 76 | MN.82 | ........................................................................................... |
| | | ......................................................................RVRPFYKANEISEEAYVSAIK |
| | | EEISKVVKIQEELDTDVLVHGFPERNDMVEYFGEQLSGFAFIANGWVQSYGSRCVKPPTIYGDVSRPNPMTVEWSKMAQSMTPRPM |
| 76 | MN.124 | ................IATAFLSVSNNYEYILSDKLVVSTSCSLMHTAVDLVNETKLDSEIKSWLAFAAQKVVEVNALGKALVGLKDEAYF |
| | | AANAAAQASRRSSPRVNNEEVQKAAAALKGSDHRRATTVSARLDAQQKKLNLPVLPTTTIGSFPQTMDLRRVRREYKAKKISEEAYVSAIK |
| | | EEISKVVKIQEELDTDVLVHGFPER |
| 76 | MN.159 | YLFAGVVEGRNIWADDLAASLSTLESLEAIVGKDKLVVSTSGSLMHTAVDLVNETKLDSEIKSWLAFAAQKVVEVNALGKALVGLKDEAYF |
| | | AANAAAQASRRSSPRVNNEEVQKAAAALKGSDHRRATTVSARLDAQQKKLNLPVLPTTTIGSFPQTMDLRRVRREYKAKKISEEAYVSAIK |
| | | EEISKVVKIQEELDTDVLVHGFPERNDNVEYFGEQLSGFAFIAMGWYQSYGSRCVNPPIIYGDVSRPNPNIVFNSKMAQSMIPRPM |
| 76 | MN.185 | ........................................................................................... |
| | | ........................................................................................... |
| | | .............................................................KVRSKILSEEFGWDKDLAKKIWCFGPETTG |
| | | PNMVVDMCKGVQYLNEIKDSVVAGFQWASKEGALADENMRGICFEVCDVVLHTDAIHRGGGQVIPTARRVIFASQLTAKPRLLEPVYLVEI |
| | | QAPEGALGGIYGVLNQKRGHVFEEMQRPGTPLYNIKAYLPVIESFGFSAILRAATSGQAFPQCVFDHWDVMNSDPLEVDSQSFNLVKEIRK |
| | | RKGLKEQMTPLSDFEDKL |
| 77 | MN.140 | ........................................................................................... |
| | | ........................................................................................... |
| | | ........................................................................................... |
| | | ...............EIKDSVVAGFQWASKEGALADENMRGICFEVCDVVLHTDAIHRGGGQVIPTARRVIFASQLTAKPRLLEPVYLVEI |
| | | QAPEGALGGIYGVLNQKRGHVFEEMQRPGTPLYNIKAYLPVIESFGFSAILRAATSGQAFPQCVFDHWDVMNSDPLEVDSQSFNLVKEIRK |
| | | RKGLKEQMTPLSDFEDKL |
| 77 | MN.201 | ........................................................................................... |
| | | ......................................NAPKLVEGLKRLAKSDPMVLCSIEESGEHITAGAGELRLEICLKDLQDDFMGG |
| | | AEIIVSPPVVSFRETVLDKSCRTVMSKSPNKHNRLYMEARPLEEGLPEAIDEGRIGPRDDPKVRSKILSEEFGWDKDLAKKIWCFGPETTG |
| | | PNMVVDMCKGVQYLNEIKDSVVAGFQWASKEGALADENMRGICFEVCDVVLHTDAIHRGGGQVIPTARRVIFASQLTAKPRLLEPVYLVEI |
| | | QAPEGALGGIYGVLNQKRGHVFEEMQRPGTPLYNIKAYLPVIESFGFSAILRAATSGQAFPQCVFDHWDVMNSDPLEVDSQSFNLVKEIRK |
| | | RKGLKEQMTPLSDFEDKL |
| 77 | MN.193 | ........................................................................................... |
| | | ........................................................................................... |
| | | ......................................................IGPRDDPKVRSKILSEEFGWDKDLAKKIWCFGPETTG |
| | | PNMVVDMCKGVQYLNEIKDSVVAGFQWASKEGALADENMRGICFEVCDVVLHTDAIHRGGGQVIPTARRVIFASQLTAKPRLLEPVYLVEI |
| | | QAPEGALGGIYGVLNQKRGHVFEEMQRPGTPLYNIKAYLPVIESFGFSAILRAATSGQAFPQCVFDHWDVMNSDPLEVDSQSFNLVKEIRK |
| | | RKGLKEQMTPLSDFEDKL |
| 77 | MN.183 | ........................................................................................... |
| | | ........................................................................................... |
| | | .....................................................RIGPRDDPKVRSKILSEEFGWDKDLAKKIWCFGPETTG |
| | | PNMVVDMCKGVQYLNEIKDSVVAGFQWASKEGALADENMRGICFEVCDVVLHTDAIHRGGGQVIPTARRVIFASQLTAKPRLLEPVYLVEI |
| | | QAPEGALGGIYGVLNQKRGHVFEEMQRPGTPLYNIKAYLPVIESFGFSAILRAATSGQAFPQCVFDHWDVMNSDPLEVDSQSFNLVKEIRK |
| | | RKGLKEQMTPLSDFEDKL |
| 77 | MN.184 | ........................................................................................... |
| | | ........................................................................................... |
| | | .....................................................RIGPRDDPKVRSKILSEEFGWDKDLAKKIWCFGPETTG |
| | | PNMVVDMCKGVQYLNEIKDSVVAGFQWASKEGALADENMRGICFEVCDVVLHTDAIHRGGGQVIPTARRVIFASQLTAKPRLLEPVYLVEI |
| | | QAPEGALGGIYGVLNQKRGHVFEEMQRPGTPLYNIKAYLPVIESFGFSAILRAATSGQAFPQCVFDHWDVMNSDPLEVDSQSFNLVKEIRK |
| | | RKGLKEQMTPLSDFEDKL |
| 77 | MN.173 | ........................................................................................... |
| | | ........................................................................................... |
| | | .......................................................................................ETTG |
| | | PNMVVDMCKGVQYLNEIKDSVVAGFQWASKEGALADENMRGICFEVCDVVLHTDAIHRGGGQVIPTARRVIFASQLTAKPRLLEPVYLVEI |
| | | QAPEGALGGIYGVLNQKRGHVFEEMQRPGTPLYNIKAYLPVIESFGFSAILRAATSGQAFPQCVFDHWDVMNSDPLEVDSQSFNLVKEIRK |
| | | RKGLKEQMTPLSDFEDKL |
| 77 | MN.210 | DPEGPLMLYVSKMIPASDKGRFFAFGRVFAGRVATGMKVRIMGPNFVPGQKKDLYTKSVQRTVIWMGKKQESVEDVPCGNTVALVGLDQFI |
| | | TKNATLTGEKEVDACPIRAMKFSVSPVVRVAVQCKVASDLPKLVEGLKRLAKSDPMVLCSIEESGEHITAGAGELRLEICLKDLQDDFMGG |
| | | AEIIVSPPVVSFRETVLDKSCRTVMSKSPNKHNRLYMEARPLEEGLPEAIDEGRIGPRDDPKVRSKILSEEFGWDKDLAKKIWCFGPETTG |
| | | PNMVVDMCKGVQYLNEIKDSVVAGFQWASKEGALADENMRGICFEVCDVVLHTDAIHRGGGQVIPTARRVIFASQLTAKPRLLEPVYLVEI |
| | | QAPEGALGGIYGVLNQKRGHVFEEMQRPGTPLYNIKAYLPVIESFGFSAILRAATSGQAFPQCVFDHWDVMNSDPLEVDSQSFNLVKEIRK |
| | | RKGLKEQMTPLSDFEDKL |
| 77 | MN.206 | DPEGPLMLYVSKMIPASDKGRFFAFGRVFAGRVATGMKVRIMGPNFVPGQKKDLYTKSVQRTVIWMGKKQESVEDVPCGNTVALVGLDQFI |
| | | TKNATLTGEKEVDACPIRAMKFSVSPVVRVAVQCKVASDLPKLVEGLKRLAKSDPMVLCSIEESGEHITAGAGELRLEICLKDLQDDFMGG |
| | | AEIIVSPPVVSFRETVLDKSCRTVMSKSPNKHNRLYMEARPLEEGLPEAIDEGRIGPRDDPKVRSKILSEEFGWDKDLAKKIWCFGPETTG |
| | | PNMVVDMCKGVQYLNEIKDSVVAGFQWASKEGALADENMRGICFEVCDVVLHTDAIHRGGGQVIPTARRVIFASQLTAKPRLLEPVYLVEI |
| | | QAPEGALGGIYGVLNQKRGHVFEEMQRPGTPLYNIKAYLPVIESFGFSAILRAATSGQAFPQCVFDHWDVMNSDPLEVDSQSFNLVKEIRK |
| 77 | MN.136 | ........................................................................................... |
| | | ........................................................................................... |
| | | ........................................................................................... |
| | | ......................AGFQWASKEGALADENMRGICFEVCDVVLHTDAIHRGGGQVIPTARRVIFASQLTAKPRLLEPVYLVEI |
| | | QAPEGALGGIYGVLNQKRGHVFEEMQRPGTPLYNIKAYLPVIESFGFSAILRAATSGQAFPQCVFDHWDVMNSDPLEVDSQSFNLVKEIRK |
| | | RKGLKEQMTPLSDFEDKL |
| 78 | MN.94 | RHLARQFIPHLHQRFIHPPIRQPNTMENLSSTIFSFVILLSASASLVVAGDPIKEACGGTRFPETCASVLSANKDPRSTYADPGELAEMEV |
| | | SAAFHLFSMAVTTTRSQQWNDEN |
| 78 | MN.83 | RHLARQFIPHLHQRFIHPPIRQPNTMENLSSTIFSFVILLSASASLVVAGDPIKEACGGTRFPETCASVLSANKDPRSTYADPGELAEMEV |
| | | S |
| 78 | MN.14 | ......................PNTMENLSSTIFSFVILLSASASLVVAGDPIKEACRGTRFPETCASVLSANKDPR |
| 78 | MN.3 | ........................................................................................... |
| | | ................................................YYGKINLSKVRTFLTEAKAKHTEWNCDVCERGDDKKKVDEISK |
| | | G |
| 78 | MN.46 | .PHVARIRPHLHQRFIHPPIHQPNTMENLSSTIFSFVILLSASASLVVAGDPIKEACGGTRFPETCASVLSANKDPR |
| 78 | MN.17 | .........................MENLSSTIFSFVILLSASASLVVAGDPIKEACGGTRFPETCASVLSANKDPRSAYVD |
| 78 | MN.20 | .........................MENLSSTIFSFVILLSASASLVVAGDPIKEACGGTRFPETCASVLSANKDPRSTYVDP |
| 78 | MN.12 | ........................................................................................... |
| | | .....................................FTPHSLKLBKACEAFNPYDGKTISLSKVRSFLTEAKAKHIEWNCDVCRHGDDKKK |
| 78 | MN.35 | ........................................................................................... |
| | | ................QQWNDENMSKEDEDCFKECGVKLHKACEAFNPYDGKISLSKVRSFLTEAKAKHIEWNCDVCRHGDDKKK |
| 78 | MN.15 | ........................................................................................... |
| | | ....................................FTPHSLKLBKACEAFDPYYGKISLSKVRSFLTEAKAKHIEWNCDVCRHGDDKKKV |
| 78 | MN.38 | ........................................................................................... |
| | | ...............QQWNDENMSKEDEDCFKECGVKLHKACEAFDPYYGKISLSKVRSFLTEAKAKHIEWNCDVCRHGDDKKKV |
| 78 | MN.74 | .......................NTNENLSSTIFSFVILLSASASLVVAGDQINEACGGTRFPEICASVLSANKDPRSTYADPVELAEMEV |
| | | SAAFRLFSMAVTAARSQQWNDEN |
| 78 | MN.41 | ........................................................................................... |
| | | ...............SQQWNDENMSKEDEDCFKECGVKLHKACEAFDPYDGKISLSKVRSFLTEAKAKHIEWNCDVCRHGDDKKKVD |
| 78 | MN.67 | ....................MENLSSTTFSFVILLSASASLVVAGDPIKEACGGTPSPETCASVLSANKDPRSBYADPVELAEMEV |
| | | SAAFHLFSMAVTAARSQQWNDEN |
| 78 | MN.27 | ........................................................................................... |
| | | ...............QQWNDENMSKEDEDCFKECGVKLHKACEAFNPYDGKISLSKVRSFLAEAKAKHIEWNCDVCR |
| 78 | MN.75 | ......................................LLSASASLVVAGDPTNEACGSSRYPETCASVLSANKDPRSTYADPGELAEMEC |
| | | GTDEBLFSMTVIAAGSQQWNDCMMSKEDEDCFKECGVKL |
| 78 | MN.47 | ........................................................................................... |
| | | .............GSQQWNDENMSKEDEDCFKECGVKLHKACDAFNPYYGKTNLSKVRTFLTEAKAKHIEWNCDVCRHGDDKKTVDEISK |
| 78 | MN.33 | .............DGGREILHQPNTMENLSSTIFSFVILLSASASLVVAGDSINEACGGSRYPEICVSVLSANRDPRST |
| 78 | MN.86 | ....................................................IKEACGGTRFPETCASVLSANKDPRSTYADPVELAEMEV |
| | | SAAFHLFSMAVTAARSQQWNDENMSKEKRWNAALTSISASSTGSAYVDLGSLLAERTEACASGKRVPPHASLI |
| 78 | MN.59 | ....................................................IKEACGGTRYPETCASVLSANKDPRSYYADPVELAEMEV |
| | | SAAFHLFSMAVTAARSQQWNDENMSKEDEMMSKEDEDCFKECGCKLHTLDR |
| 78 | MN.63 | ....................................................IKEACGGTRFPETCASVLSANKDPRSTYADPVELAEMEV |
| | | SAAFHLFSMAVTAARSQQWNDENMSKEDEDCFKECGVKLHKACEAFNP |
| 78 | MN.8 | ..............................STIFSFVILLSASAELVVAGDPIKEACGGPRYPETCASVLSANKDPRSTYA |
| 78 | MN.51 | ...................................................IKEACGGTRFPETCASVLSANKDPRSTYADPVELAEMEV |
| | | SAAFHLFSMAVTAARSQQWNDENMSKEDEDCFKECGVRL |
| 78 | MN.62 | ...................................................IKEACGGTRFPETCASVLSANKDPRSTYADPVELAEMEV |
| | | SAAFHLFSMAVTAARSQQWNDZNMSKEDEDCFKECGMKLRKACEAFNP |
| 78 | MN.56 | ...................................................IKEACGGTRFPETCASVLSANKDPRSTYADPVELAEMEV |
| | | SAAFHLFSMAVTAARSQQWNDENMSKEDEDCFKECGLNASHAL |
| 78 | MN.30 | ...................RAAVTTMENLSSTIFSFVILLSASASLVVAGDPIKEACGGTRZPETCASVLSANKDPREAYVDLG |
| 79 | MN.81 | ........................................................................................... |
| | | .........................................................................VKLKNVLNVYEARLTKFK |
| | | YLAGDYLSLADLNHVSTILCLGATPHASLFDAYPHVKAWWTDLLAKPSVQKVAALMKP |
| 79 | MN.91 | ........................................................................................... |
| | | ....................................................................VEDNLVKENNVLNVYEARCIRSK |
| | | YLAGDYLSLADLNHVSTILCLGATPHASLFDAYPHVKAWWTDLLAKPSVQKVAALMKP |
| 79 | MN.36 | ........................................................................................... |
| | | ...........................................................................LKKVLEVYEARLTKFK |
| | | YLAGDYLSLADLNHVSTILCLGATPHASLFDAYPHVKAWWTDLLAKPSVQKVAA |
| 79 | MN.71 | ........................................................................................... |
| | | ........................................................................................... |
| | | ..........DLNHVSTTLCLGATPHASLFDAYPHVKAWWTDLLAKPSVQKVAALMKP |
| 79 | MN.80 | ........................................................................................... |
| | | ......................................................................DNLVKLKNVLNVYEARLTKSK |
| | | YLAGDYLSLADLNHVSTILCLGATPHASLFDAYPHVKAWWTDLLAKPSVQKVAALMKP |
| 79 | MN.76 | ........................................................................................... |
| | | ............................................................................KEVLEVYEARLTKFK |
| | | YLAGDYLSLADLNHVSTILCLGATPHASLFDAYPHVKAWWTDLLAKFSVQKVAALMKP |
| 79 | MN.96 | ........................................................................................... |
| | | .........................................QYTAALSPILFECLIHPMLGGATNQKVVEDNLVKLKNVLNVYEARLTKSK |
| | | YLAGDYLSLADLNHVSTTLCLGATPHASLFDAYPHVKAWWTDLLAKPSVQKVAALMKP |
| 79 | MN.106 | ........................................................................................... |
| | | .........................................QYTAALSPILFECLIHPMLGGATNQKVIEDNLVKLKNVLNVYEARLTKSK |
| | | YLAGDYLSLADLNHVSTTLCLGATPHASLFDAYPHVKAWWTDLLAKPSVQKVAALMKP |
| 79 | MN.90 | ........................................................................................... |
| | | .........................................QYTAALSPILFECLIHPMLGGATNQKVVEDNLVKLKNVLNVYEARLTKFK |
| | | YLAGDYLSLADLNHVSTTLCLGATPHASLFDAYPHVKAWWTDLLAKPSVQKVAALMKP |
| 79 | MN.57 | AALEEAGVDYEIVPINFGTGEHKAPDHLARNBFGQVPALQDGDL |
| | | CIFESRAICKYACRKNKPELLKEGDLKEAAMDEALEENG |
| 79 | MN.25 | ........................................................................DHLARNPFGQVPALQDGDL |
| | | CIFESRAICKYACRKNKPELLKEGDLKESAMVDVWLEVEANQY |
| 79 | MN.108 | CIPYAESAGGEVTVLVISSRKKGAAAGVLFPKGGWCLDEIMECAARREALEEAGVDYEIVPINSGIGEAKGSDBLARNPIGQVPALQDGDL |
| | | CIFESRAICKYACRKNRPELLNEGDLKESAMVDVWLEVEAQQYTAALSPILFFCLVHPMLGGATDDDQKVVEDNLIQ |
| 80 | MN.186 | KLRFTCLSSTGSSCLFVLILF |
| 81 | MN.58 | ERLKKVIEVYEAKLSNHSYLAGDFVSEADINRFPKTFYYFYMATPRASLFDSYYYPRVKQWWERIMARPPAVKKIAAAMVPPKA |
| 82 | MN.6 | ........................................................................................... |
| | | PDHLARNPFGQVPALQDGDLYIFESRAICKYACRKNKPELLKEGDL |
| 82 | MN.77 | .....................................................................LEEAGVDYEIVPINFGTGERKG |
| | | PDHLARNPFGQVPALQDGDLYIFESRAICKYACRKNKPELLKEGDLKESAMVDVWLEVEANQYTAALGPILFE |
| 82 | MN.107 | PAPRRLFKPGPPASSSPSHPIHPAATSLPPPRKRKVRGFWRVHQISARMAPVKLYGATLSWNVTRCVAALEEAGVDYEIVPINFGTGEBKG |
| | | PDHLARNPFGQVPALQDGDLYIFESRAICKYACRKNKPELLKEGDLKESAMVDVWLEVEANQYTAALGPILFE |
| 83 | MN.203 | ..........................RLKKLKSEHGKVQLGNITVDMVLGGMRGMTGMLWETSLLDPEEGIRFRGLSIPECQKVLPTAVKG |
| | | GEPLPEGLLWLLLTGKVPTKEQVDALSKDLLSRSTVPGYVYKAIDALPVTAHPMTQFTTGVMALQVESEFAKAYDKGMPKSKFWEPTYEDC |
| | | LNLIARLPQVASYVYRRIFKDGTIAADNSLDYAANFSHMLGFDDPKMLELMRLYITIHTDHEGGNVSAHTGHLVGSALSDPYLSFAAALN |
| | | GLAGPLHGLANQEVLLWIKSVMEETGSNITTDQLKEYVWKTLKSGKVVPGYGHGVLRNTDPRYSCQREFALKHLPEEPLFQLVSKLYEVVP |
| | | GILTELGKVKNPWPNVDAHSGVLLNHFGLVEARYHTVLFGVSRSMGIGSQLIWDRALGLPLERPKSVTMEWLGNHCKKVAA |
| 83 | MN.204 | ..........................RLKKLKSEHGKVQLGNITVDMVLGGMRGMTGMLWETSLLDPEEGIRFRGLSIPECQKVLPTAVKG |
| | | GEPLPEGLLWLLLTGKVPTKEQVDALSKDLLSRSTVPGYVYKAIDALPVTAHPMTQFTTGVMALQVESEFAKAYDKGMPKSKFWEPTYEDC |
| | | LNLIARLPQVASYVYRRIFKDGTIAADNSLDYAANFSHMLGFDDPKMLELMRLYITIHTDHEGGNVSAHTGHLVGSALSDPYLSFAAALN |
| | | GLAGPLHGLANQEVLLWIKSVMEETGSNITTDQLKEYVWKTLKSGKVVPGYGHGVLRNTDPRYSCQREFALKHLPEEPLFQLVSKLYEVVP |
| | | GILTELGKVKNPWPNVDAHSGVLLNHFGLVEARYHTVLFGVSRSMGIGSQLIWDRALGLPLERPKSVTMEWLGNHCKKVAA |
| 83 | MN.211 | AYPEACSLFLNTAVSPNYFVCNLLQERLKKLKSEHGKVQLGNITVDMVLGGMRGMTGMLWETSLLDPEEGIRFRGLSIPECQKVLPTAVKG |
| | | GEPLPEGLLWLLLTGKVPIKEQVDALSKDLLSRSTVPGYVYKAIDALPVIARPMIGFIIGVMALQVESEFAKAYDKGMPKSWEPIYEDC |
| | | LNLIRLPQVASTVIRRIFKDGKIIAADNSLDYAANFSHMLGFDDPKMLELMRLYITIHTDHOGGNVSAHIGHLVGSALSDPYLSPAALN |
| | | GLAGPLHGLANQEVLLWIKSVMEETGSNITIDQLKEYVWKTLKSGKVVPGYGHGALRDTDFRYSCQREFALKELPEDDPLFQLVSKLYEVVP |
| | | GILTELGRVKNPNPNVDAHSGVLLNHFGLVEARYDTVLFGVSRSMGIGSQLIWDRAL |
| 83 | MN.205 | AYPEACSLFLNTAVSPNYFVCNLLQERLKKLKSEHGKVQLGNITVDMVLGGMRGMTGMLWETSLLDPEEGIRFRGLSIPECQKVLPTAVKG |
| | | GEPLPEGLLWLLLTGKVPIKEQVDALSKDLLSRSTVPGYVYKAIDALPVIARPMIGFIIGVMALQVESEFAKAYDKGMPKSWEPIYEDC |
| | | LNLIRLPQVASTVIRRIFKDGKIIAADNSLDYAANFSHMLGFDDPKMLELMRLYITIHTDHOGGNVSAHIGHLVGSALSDPYLSPAALN |
| | | GLAGPLHGLANQEVLLWIKSVMEETGSNITIDQLKEYVWKTLKSGKVVPGYGHGALRDTDPRYSCQREFALKELPEDDPLFQLVSKLYEVVP |
| | | GILTELGRVKNPNPNVDAHSGVLLNHFGLVEARYDTVLFGVSRSMGIGSQLIWDRALGLPLERPKSVIMEWLGNHCKKGA |
| 83 | MN.68 | ........................................................................................... |
| | | ........................................................................................... |
| | | ........................................................................................... |
| | | ...................................................................................VEKLYEVVP |
| | | GILTELGRVKNPNPNVDAHSGVLLNHFGLVEARYDTVLFGVSRSMGIGSQLIWDRALGLPLERPKSVIMEWLGNHCKKGA |
| 83 | MN.98 | ........................................................................................... |
| | | ........................................................................................... |
| | | ........................................................................................... |
| | | ...........................................................TDPRYSCQREFALKELPEDDPLFQLVSKLYEVVP |
| | | GILTELGRVKNPNPNVDAHSGVLLNHFGLVEARYDTVLFGVSRSMGIGSQLIWDRALGLPLERPKSVIMEWLENHCKKVAA |
| 83 | MN.93 | ........................................................................................... |
| | | ........................................................................................... |
| | | ........................................................................................... |
| | | ...................................................................................VEKLYEVVP |
| | | GILTELGRVKNPNPNVDAHSGVLLNHFGLVEARYDTVLFGVSRSMGIGSQLIWDRALGLPLERPKSVIMEWLGNHCKKVAA |
| 83 | MN.113 | ........................................................................................... |
| | | ........................................................................................... |
| | | ........................................................................................... |
| | | ...................................................................................VEKLYEVVP |
| | | GILTELGRVKNPNPNVDAHSGVLLNHFGLVEARYDTVLFGVSRSMGIGSQLIWDRALGLPLERPKSVIMEWLGNHCKKVAA |
| 83 | MN.123 | ........................................................................................... |
| | | ........................................................................................... |
| | | ........................................................................................... |
| | | ...........................................................TDPRYSCQREFALKELPEDPLFQLVSKLYEVVP |
| | | GILTELGRVKNPNPNVDAHSGVLLNHFGLVEARYDTVLFGVSRSMGIGSQLIWDRALGLPLERPKSVIMEWLENHCKKVAA |
| 83 | MN.69 | ........................................................................................... |
| | | ........................................................................................... |
| | | ........................................................................................... |
| | | ...........................................................................EDPLFQLVSKLYEVVP |
| | | GILTELGRVKNPNPNVDAHSGVLLNHFGLVEARYDTVLFGVSRSMGIGSQLIWDRALGLPLERPKSVTMEWLG |
| 84 | MN.178 | PRPMKGMLTGPVTILNNSTVSSDQPRFETCTQIALAIKKIVEDLEAGGIQVIQIDEAALREGLPLKKSTHAFTYLDWAVHSEFRITNCGVQDT |
| | | TQIHTHMCYSWPNDLIWSTINMDADVITINNKKRDEKLLSVFGVTIGMGIGPGVYDIHSPRIPTAETADMVNMMLAVLDTNILWVNPD |
| | | CGLKIRKYAEVMPALTINMVTAAKLIRIQLASTK |
| 84 | MN.182 | ....KGMLTGPVTILNNSTVSSDQPRFETCTQIALAIKKIVEDLEAGGIQVIQIDEAALREGLPLKKSTHAFTYLDWAVHSEFRITNCGVQDT |
| | | TQIHTHMCYSWPNDLIWSTINMDADVITINSRSDEKLLSVFGVTIGMGIGPGVYDIHSPRIPTAETADMVNMMLAVLDTNILWVNPD |
| | | CGLKIRKYAEVMPALTINMVTAAKLIRIQLASTK |
| 84 | MN.4 | ........................................................................................... |
| | | ......................................VFGVTIGMGIGPGVYDIHSPRIPTAETADMVNMMLAVLDTNI |
| 84 | MN.166 | ....KGMLTGPVTILNNSTVSSDQPRFETCTQIALAIKKIVEDLEAGGIQVIQIDEAALREGLPLKKSTHAFTYLDWAVHSEFRITNCGVQDT |
| | | TQIHTHMCYSWPNDLIWSTINMDADVITINSRSDEKLLSVFGVTIGMGIGPGVYDIHSPRIPTAETADMVNMMLAVLDTNILWVNPD |
| | | CGLKIRKYAEVMPALTINMVTAAKLIRIQLASTK |
| 84 | MN.167 | ....KGMLTGPVTILNNSTVSSDQPRFETCTQIALAIKKIVEDLEAGGIQVIQIDEAALREGLPLKKSTHAFTYLDWAVHSEFRITNCGVQDT |
| | | TQIHTHMCYSWPNDLIWSTINMDADVITINSRSDEKLLSVFGVTIGMGIGPGVYDIHSPRIPTAETADMVNMMLAVLDTNILWVNPD |
| | | CGLKIRKYAEVMPALTINMVTAAKLIRIQLASTK |
| 84 | MN.172 | PEPMKGMLTGPVTILNNSTVSSDQPRFETCTQIALAIKKIVEDLEAGGIQVIQIDEAALREGLPLKKSTHAFTYLDWAVHSEFRITNCGVQDT |
| | | TQIHTHMCYSWPNDLIWSTINMDADVITINNKKRDEKLLSVFGVTIGMGIGPGVYDIHSPRIPTAETADMVNMMLAVLDTNILWVNPD |
| | | CGLKIRKYAEVMPALTINMVTAAKLIRIQLASTK |
| 84 | MN.158 | ...............LNNSTVSSDQPRFETCTQIALAIKKIVEDLEAGGIQVIQIDEAALREGLPLKKSTHAFTYLDWAVHSEFRITNCGVQDT |
| | | TQIHTHMCYSWPNDLIWSTINMDADVITINNKKRDEKLLSVFGVTIGMGIGPGVYDIHSPRIPTAETADMVNMMLAVLDTNILWVNPD |
| | | CGLKIRKYAEVMPALTINMVTAAKLIRIQLASTK |
| 84 | MN.105 | PRPMKGMLTGPVTILNNSTVSSDQPRFETCTQIALAIKKIVEDLEAGGIQVIQIDEAALREGLPLKKSTHAFTYLDWAVHSEFRITNCGVQDT |
| | | TQIHTHMCYSWPNDLIWSTINMDADVITINNKKRDEKLLSVFGVTIGMGIGPGVYDIHSPRIPTAEEI |
| 85 | MN.39 | LAETHMCYSWPNDLIWSTINMDADVITINNKKRDEKLLSVFGVTIGMGIGPGVYDIHSPRIP |
| 86 | MN.194 | ......MSTAEATREENVYMAKLAEQAERYEEMVEFMEKVAKTADVGELIVEERNLLSVAYKNVIGARRASWRIISSIEQKEESRGNEAYVA |
| | | SIKEYRIRIELSKICDGILKLLDSHLVPSATAAESKVFYLKMKGDYHRYYLAEFKAGAERKEAAENTLVAYKSAQDIALADLPITHPIRL |
| | | GLALNFSVFYYEILNSPDRACNLAKQAFDEAIAELDSLGEESYKDSTLIMQLLRLNLTLWTSDNADEGGDEIKEASKPEGECH |
| 86 | MN.195 | ......MSTAEATREENVYMAKLAEQAERYEEMVEFMEKVAKTADVGELIVEERNLLSVAYKNVIGARRASWRIISSIEQKEESRGNEAYVA |
| | | SIKEYRIRIELSKICDGILKLLDSHLVPSATAAESKVFYLKMKGDYHRYYLAEFKAGAERKEAAENTLVAYKSAQDIALADLPITHPIRL |
| | | GLALNFSVFYYEILNSPDRACNLAKQAFDEAIAELDSLGEESYKDSTLIMQ |
| 86 | MN.101 | ...........................................................................SIEQKEESRGNEAYVA |
| | | SIKEYRIRIELSKICDGILKLLDSHLVPSATAAESKVFYLKMKGDYHRYYLAEFKAGAERKEAAENTLVAYKSAQDIALADLPITHPIRL |
| | | GLALNFSVFYYEILNSPDRACNLAKQAFDEAIAELDSLGEESYKDSTLIMQ |
| 86 | MN.116 | ......MSTAEATREENVYMAKLAEQAERYEEMVEFMEKVAKTADVGELIVEERNLLSVAYKNVIGARRASWRIISSIEQKEESRGNEAYVA |
| | | SIKEYRIRIELSKICDGILKLLDSHLVPSATAAESKVFYLKMKGDYHRYYLAEFKAGAERKEAAENTLVAYKS |
| 86 | MN.181 | ......MSTAEATREENVYMAKLAEQAERYEEMVEFMEKVAKTADVGELIVEERNLLSVAYKNVIGARRASWRIISSIEQKEESRGNEAYVA |
| | | SIKEYRIRIELSKICDGILKLLDSHLVPSATAAESKVFYLKMKGDYHRYYLAEFKAGAERKEAAENTLVAYKSAQDIALADLPITHPIRL |
| | | GLALNFSVFYYEILNSPDRACNLAKQAFDEAIAELDSLGEESYKDSTLIMQLLRLNLTLWTSDNADEGGDEIKEASKPEGECH |
| 86 | MN.97 | ........................................................................................... |
| | | ........................................................RKEAAENTLVAYKSAQDIALADLPITHPIRL |
| | | GLALNFSVFYYEILNSPDRACNLAKQAFDEAIAELDSLGEESYKDSTLIMQLLRLNLTLWTSDNADEGGDEIKEASKPEGECH |
| 86 | MN.54 | ........................................................................................... |
| | | ........................................................................................... |
| | | ......FSVFTYYEILNSPDRACNLAKQAFDEAISELDSLGEESYKDSTLIMQLLRDNLTLWISDTNEDCGGDEIKEAPAPKESGDCQ |
| 86 | MN.156 | ..................YMAKLAEQAERYEEMVEFMEKVAKTADVGELIVEERNLLSVAYKNVIGARRASWRIISSIEQKEESRGNEAYVA |
| | | SIKEYRIRIELSKICDGILKLLDSHLVPSATAAESKVFYLKMKGDYHRYYLAEFKAGAERKEAAENTLVAYKSAQDIALADLPITHPIRL |
| | | GLALNFSVFYYEILNSPDRACNLAKQAFDEAIAELDSLGEESYKDSTLIMQLLRLNLTLWTSDNADEGGDEIKEASK |
| 86 | MN.117 | ......MSTAEATREENVYMAKLAEQAERYEEMVEFMEKVAKTADVGELIVEERNLLSVAYKNVIGARRASWRIISSIEQKEESRGNEAYVA |
| | | SIKEYRIRIELSKICDGILKLLDSHLVPSATAAESKVFYLKMKGDYHRYLAEFKA |
| 86 | MN.163 | ........................................................................................... |
| | | .......................................................GAERKEAAENTLVAYKSAQDIALADLPITHPIRL |
| | | GLALNNFSVFYYEILNSPDHACNLAKQAFDEAIAELDSLGEESYKDSILIMQLLRDNLTLWISDNADEGGDEIKEASKPEGEGH |
| 86 | MN.175 | .......................................................................................... |
| | | .........................................................GAERKEAAENTLVAYKSAQDIALADLPITHPIRL |
| | | GLALNNFSVFYYEILNSPDHACNLAKQAFDEAIAELDSLGEESYKDSILIMQLLRDNLTLWISDNADEGGDEIKEASKPEGEGH |
| 86 | MN.102 | .....METAEATREENVYMAKLAEQAERYEEMVEFMEKVAKTADVGELTVEERNLLSVAYKNVIGARRASWRIISSIEQKEESRGNEAYVA |
| | | SIKEYRTRIETELSKICDGILKLLDSHLVPSATAAESKVTYLKMKGDYHRYLAEFKAG |
| 86 | MN.202 | .....METAEATREENVYMAKLAEQAERYEEMVEFMEKVAKTADVGELTVEERNLLSVAYKNVIGARRASWRIISSIEQKEESRGNEAYVA |
| | | SIKEYRTRIETELSKICDGLKLLDSHLVPSATAAESKVTYLKMKGDYHRYLAETKAGAERKEAAENILVAYKSAQDIALADLPIIHPIRL |
| | | GLALNNFSVFYYEILNSPDHACNLAKQAFDEAIAELDSLGEESYKDSILIMQLLRDNLTLWISDNADEGGDEIKEASKPEGEGH |
| 87 | MN.157 | ........................RPSSVLPFDLKEAEAELQPPSRTPMGTVSSYYNYLYIIFIKSVFGTVGIFHKJHKKGSVYEVHEI |
| | | LAEEVLGKMGAPPKIDVPIISPQELLKEADGILFGFPTHFGMMASQMKAFDATGGLWREQSLAGFFAGVFFSTGIQGGGQEITPLIAVTQL |
| | | THHGMVFVPVGYTFGAKMFDMEKVQGGSPYGAGTFAGDGSRWPSEMELEHAFHQGKYFYGIAKKLKGSSA |
| 87 | MN.119 | ........................................................................................PEI |
| | | LAEEVLGKMGAPPKIDVPIISPQELLKEADGILFGFPTHFGMMASQMKAFDATGGLWREQSLAGFFAGVFFSTGIQGGGQEITPLIAVTQL |
| | | THHGMVFVPVGYTFGAKMFDMEKVQGGSPYGAGTFAGDGSRWPSEMELEHAFHQGKYFYGIAKKLKGSSA |
| 87 | MN.114 | ........................................................................................PEI |
| | | LAEEVLGKMGAPPKIDVPIISPQELLKEADGILFGFPTHFGMMASQMKAFDATGGLWREQSLAGFFAGVFFSTGIQGGGQEITPLIAVTQL |
| | | THHGMVFVPVGYTFGAKMFDMEKVQGGSPYGAGTFAGDGSRWPSEMELEHAFHQGKYFYGIAKKLKGSSA |
| 87 | MN.92 | ..............................................................VGKLAEEIKKGASSVEGVEVKVWQVFEI |
| | | LAEEVLGKMGAPPKIDVPIISPQELLKEADGILFGFPTHFGMMASQMKAFDATGGLWREQSLAGFFAGVFFSTGIQGGGQEITPLIAVTQL |
| | | THHGMVFVPVGY |
| 87 | MN.88 | .......................................................................................... |
| | | .............................GILFGFPTHFGMMASQMKAFDATGGLWREQSLAGFFAGVFFSTGIQGGGQEITPLIAVTQL |
| | | THHGMVFVPVGYTFGAKMFDMEKVQGGSPYGAGTFAGDGSRWPSEMELEHAFH |
| 87 | MN.153 | QGTATSAGSRALPFLLQLTKQPATRPSSVLFFDLRSAEAELQPPRRPPHAVKVYVVYYSMYGHVGKLAEEIKKGASSVEGVEVRAKQVPEI |
| | | LAEEVLGKMGAPPKIDVPIISPQELLKEADGILFGFPTHFGMMASQMKAFDATGGLWREQSLAGFFAGVFFSTGIQGGGQEITPLIAVTQL |
| | | THHGMVFVPVGYTFGAKMFDMEKVQGGSPYGAGTFAGDGSRWPSEMELEHAFH |
| 87 | MN.95 | ...............................................MAVKVYVVYYSMYGHVGKLAEEIKKGASSVEGVEVRAKQVPEI |
| | | LAEEVLGKMGAPPKIDVPIISPQELLKEADGILFGFPTHFGMMASQMKAFDATGGLWREQSLAGFFAGVFFSTGIQGGGQEITPLIAVTQL |
| | | TQHGMVF |
| 87 | MN.128 | ......................................................................IKKGASSVEGVEVRAKQVPEI |
| | | LAEEVLGKMGAPPKIDVPIISPQELLKEADGILFGFPTHFGMMASQMKAFDATGGLWREQSLAGFFAGVFFSTGIQGGGQEITPLIAVTQL |
| | | THHGMVFVPVGYTFGAKMFDMEKVQGGSPYGAGTFAGDGSRWPSEMELEHAFHQGKYFYGIAKKLKGSSA |
| 87 | MN.122 | ......................................................................IKKGASSVEGVEVRAKQVPEI |
| | | LAEEVLGKMGAPPKIDVPIISPQELLKEADGILFGFPTHFGMMASQMKAFDATGGLWREQSLAGFFAGVFFSTGIQGGGQEITPLIAVTQL |
| | | THHGMVFVPVGYTFGAKMFDMEKVQGGSPYGAGTFAGDGSRWPSEMELEHAFHQGKYFYGIAKKLKGSSA |
| 87 | MN.118 | .............................................................................VEGVEVKVKQVPEI |
| | | LAEEVLGKMGAPPKIDVPIISPQELLKEADGILFGFPTHFGMMASQMKAFDATGGLWREQSLAGFFAGVFFSTGIQGGGQEITPLIAVTQL |
| | | THHGMVFVPVGYTFGAKMFDMEKVQGGSPYGAGTFAGDGSRWPSEMELEHAFHQGKYFYGIAKKLKGSSA |
| 87 | MN.99 | ........................................................................................... |
| | | .............KIDVPIISPQELLKEADGILFGFPTHFGMMASQMKAFDATGGLWREQSLAGFFAGVFFSTGIQGGGQEITPLIAVTQL |
| | | THHGMVFVPVGYTFGAKMFDMEKVQGGSPYGAGTFAGDGSRWPSEMELEHAFHQGKYFYGIAKKLKGSSA |
| 88 | MN.72 | ADVYFIVCLPMCVCVLFVICS |
| 89 | MN.214 | ........................................................................................... |
| | | ...............GLGRLAACFLDSMAILNLPAWGYGLRYRYGLFKQRIAKEGQEEIAEDWLEKFSPWEIVRHDVVYPVRFFGHVEILP |
| | | DGRRKSAGGEVLNALAYDVPIPGYKTKNAISLRLWDAKASAEDFNLEQFNDGQYESAAQLHSRAQQICAVLYPGDATEEGKLLRLKQQFFL |
| | | CSASLQDIIFRFKERKSDRVSGKWSEFPSKVAVQMNDTHPTLAIPELMRLLMDEEGLGWDEAWDVTNKTVAYTNHTVLPEALEKWSQSVMR |
| | | KLLPRQMEIIEEIDKRFREMVISTRKDMEGKLDSMSVLDNSPQKPVVRMANLCVVSAHTVNGVAELHSNILKEELFADYVSIWPKKFQNKT |
| | | NGITPRRWLRFCNPELSEIVTKWLNTDQWTSNLDLLTGLRKFADDEKLHAEWAAAKLASKKRLAKHVLDATGVTIDPTSLFDIQIKRIHEY |
| | | KRQLMNILGAVYRYKKLKEMSAEEKQKVIPRIVMVGGKAFATYTNAKRIVKVLNDVGAVVNNDPDVNKYLKVVFIPNYNVSVAEVLIPGSE |
| | | LSQHISTAGMEASGTSNMKFSLNGCVIIGTLDGANVEIREEVGEDNFFLFGAKADQVAGLRKDRENGLFKPDPRFEEAKQYIRSGTFGTYD |
| | | YIPLLDSLEGSGFGRGDYFLVGYDFPSYIDAQARVDEAYKDKKRWIKMSILNTAGSGKFSSDRTIDQYAKEIWGITANPVP |
| 89 | MN.219 | ........................................................................................... |
| | | ...............GLGRLAACFLDSMAILNLPAWGYGLRYRYGLFKQRIAKEGQEEIAEDWLEKFSPWEIVRHDVVYPVRFFGHVEILP |
| | | DGRRKSAGGEVLNALAYDVPIPGYKTKNAISLRLWDAKASAEDFNLEQFNDGQYESAAQLHSRAQQICAVLYPGDATEEGKLLRLKQQFFL |
| | | CSASLQDIIFRFKERKSDRVSGKWSEFPSKVAVQMNDTHPTLAIPELMRLLMDEEGLGWDEAWDVTNKTVAYTNHTVLPEALEKWSQSVMR |
| | | KLLPRQMEIIEEIDKRFREMVISTRKDMEGKLDSMSVLDNSPQKPVVRMANLCVVSAHTVNGVAELHSNILKEELFADYVSIWPKKFQNKT |
| | | NGITPRRWLRFCNPELSEIVTKWLNTDQWTSNLDLLTGLRKFADDEKLHAEWAAAKLASKKRLAKHVLDATGVTIDPTSLFDIQIKRIHEY |
| | | KRQLMNILGAVYRYKKLKEMSAEEKQKVIPRIVMVGGKAFATYTNAKRIVKVLNDVGAVVNNDPDVNKYLKVVFIPNYNVSVAEVLIPGSE |
| | | LSQHISTAGMEASGTSNMKFSLNGCVIIGTLDGANVEIREEVGEDNFFLFGAKADQVAGLRKDRENGLFKPDPRFEEAKQYIRSGTFGTYD |
| | | YIPLLDSLEGSGFGRGDYFLVGYDFPSYIDAQARVDEAYKDKKRWIKMSILNTAGSGKFSSDRTIDQYAKEIWGITANPVP |
| 89 | MN.220 | ........................................................................................... |
| | | ...............GLGRLAACFLDSMAILNLPAWGYGLRYRYGLFKQRIAKEGQEEIAEDWLEKFSPWEIVRHDVVYPVRFFGHVEILP |
| | | DGRRKSAGGEVLNALAYDVPIPGYKTKNAISLRLWDAKASAEDFNLEQFNDGQYESAAQLHSRAQQICAVLYPGDATEEGKLLRLKQQFFL |
| | | CSASLQDIIFRFKERKSDRVSGKWSEFPSKVAVQMNDTHPTLAIPELMRLLMDEEGLGWDEAWDVTNKTVAYTNHTVLPEALEKWSQSVMR |
| | | KLLPRQMEIIEEIDKRFREMVISTRKDMEGKLDSMSVLDNSPQKPVVRMANLCVVSAHTVNGVAELHSNILKEELFADYVSIWPKKFQNKT |
| | | NGITPRRWLRFCNPELSEIVTKWLNTDQWTSNLDLLTGLRKFADDEKLHAEWAAAKLASKKRLAKHVLDATGVTIDPTSLFDIQIKRIHEY |
| | | KRQLMNILGAVYRYKKLKEMSAEEKQKVIPRIVMVGGKAFATYTNAKRIVKVLNDVGAVVNNDPDVNKYLKVVFIPNYNVSVAEVLIPGSE |
| | | LSQHISTAGMEASGTSNMKFSLNGCVIIGTLDGANVEIREEVGEDNFFLFGAKADQVAGLRKDRENGLFKPDPRFEEAKQYIRSGTFGTYD |
| | | YIPLLDSLEGSGFGRGDYFLVGYDFPSYIDAQARVDEAYKDKKRWIKMSILNTAGSGKFSSDRTIDQYAKEIWGITANPVP |
| 89 | MN.199 | GNISYHAHYSPHFSPLAFGPEPAYFATAESVKDHLLQRWNDTYLHFHKTDPKQTYYLSMEYLQGRALTNAVGNLGITGAYAEAVKKFGYEL |
| | | EALAGQERDMALGNGGLGRLAACFLDSMAILNLPAWGYGLRYRYGLFKQRIAKEGQEEIAEDWLEKFSPWEIVRHDVVYPVRFFGHVEISP |
| | | DGRRKSAGGEVLNALAYDVPIPGYKTKNAISLRLWDAKASAEDFNLEQFNDGQYESAAQLHSRAQQICAVLYPGDATEEGKLLRLKQQFFL |
| | | CSASLQDIIFRFKERKSDRVSGKWSEFPSKVAVQMNDTHPTLAIPELMRLLMDEEGLGWDEAWDVTNKTVAYTNHTVLPEALEKWSQSVMR |
| | | KLLPRQMEIIEEIDKR |
| 89 | MN.224 | GNISYHAHYSPHFSPLAFGPEPAYFATAESVKDHLLQRWNDTYLHFHKTDPKQTYYLSMEYLQGRALTNAVGNLGITGAYAEAVKKFGYEL |
| | | EALAGQERDMALGNGGLGRLAACFLDSMAILNLPAWGYGLRYRYGLFKQRIAKEGQEEIAEDWLEKFSPWEIVRHDVVYPVRFFGHVEISP |
| | | DGRRKSAGGEVLNALAYDVPIPGYKTKNAISLRLWDAKASAEDFNLEQFNDGQYESAAQLHSRAQQICAVLYPGDATEEGKLLRLKQQFFL |
| | | CSASLQDIIFRFKERKSDRVSGKWSEFPSKVAVQMNDTHPTLAIPELMRLLMDEEGLGWDEAWDVTNKTVAYTNHTVLPEALEKWSQSVMR |
| | | KLLPRQMEIIEEIDKRFREMVISTRKDMEGKLDSMSVLDNSPQKPVVRMANLCVVSAHTVNGVAELHSNILKEELFADYVSIWPKKFQNKT |
| | | NGITPRRWLRFCNPELSEIVTKWLNTDQWTSNLDLLTGLRKFADDEKLHAEWAAAKLASKKRLAKHVLDATGVTIDPTSLFDIQIKRIHEY |
| | | KRQLMNILGAVYRYKKLKEMSAEEKQKVIPRIVMVGGKAFATYTNAKRIVKVLNDVGAVVNNDPDVNKYLKVVFIPNYNVSVAEVLIPGSE |
| | | LSQHISTAGMEASGTSNMKFSLNGCVIIGTLDGANVEIREEVGEDNFFLFGAKADQVAGLRKDRENGLFKPDPRFEEAKQYIRSGTFGTYD |
| | | YIPLLDSLEGSGFGRGDYFLVGYDFPSYIDAQARVDEAYKDKKRWIKMSILNTAGSGKFSSDRTIDQYAKEIWGITANPVP |
| 89 | MN.218 | ........................................................................................... |
| | | ..................RLAACFLDSMAILNLPAWGYGLRYRYGLFKQRIAKEGQEEIAEDWLEKFSPWEIVRHDVVYPVRFFGHVEISP |
| | | DGRRKSAGGEVLNALAYDVPIPGYKTKNAISLRLWDAKASAEDFNLEQFNDGQYESAAQLHSRAQQICAVLYPGDATEEGKLLRLKQQFFL |
| | | CSASLQDIIFRFKERKSDRVSGKWSEFPSKVAVQMNDTHPTLAIPELMRLLMDEEGLGWDEAWDVTNKTVAYTNHTVLPEALEKWSQSVMR |
| | | KLLPRQMEIIEEIDKRFREMVISTRKDMEGKLDSMSVLDNSPQKPVVRMANLCVVSAHTVNGVAELHSNILKEELFADYVSIWPKKFQNKT |
| | | NGITPRRWLRFCNPELSEIVTKWLNTDQWTSNLDLLTGLRKFADDEKLHAEWAAAKLASKKRLAKHVLDATGVTIDPTSLFDIQIKRIHEY |
| | | KRQLMNILGAVYRYKKLKEMSAEEKQKVIPRIVMVGGKAFATYTNAKRIVKVLNDVGAVVNNDPDVNKYLKVVFIPNYNVSVAEVLIPGSE |
| | | LSQHISTAGMEASGTSNMKFSLNGCVIIGTLDGANVEIREEVGEDNFFLFGAKADQVAGLRKDRENGLFKPDPRFEEAKQYIRSGTFGTYD |
| | | YIPLLDSLEGSGFGRGDYFLVGYDFPSYIDAQARVDEAYKDKKRWIKMSILNTAGSGKFSSDRTIDQYAKEIWGITANPVP |
| 89 | MN.217 | ........................................................................................... |
| | | ........................................RYRYGLFKQRIAKEGQEEIAEDWLEKFSPWEIVRHDVVYPVRFFGHVEISP |
| | | DGSRKSAGGEVLNALAYDVPIPGYKTKNAISLRLWDAKASAEDFNLEQFNDGQYESAAQLHSRAQQICAVLYPGDATEEGKLLRLKQQFFL |
| | | CSASLQDIIFRFKERKSDRVSGKWSEFPSKVAVQMNDTHPTLAIPELMRLLMDEEGLGWDEAWDVTNKTVAYTNHTVLPEALEKWSQSVMR |
| | | KLLPRQMEIIEEIDKRFREMVISTRKDMEGKLDSMSVLDNSPQKPVVRMANLCVVSAHTVNGVAELHSNILKEELFADYVSIWPKKFQNKT |
| | | NGITPRRWLRFCNPELSEIVTKWLNTDQWTSNLDLLTGLRKFADDEKLHAEWAAAKLASKKRLAKHVLDATGVTIDPTSLFDIQIKRIHEY |
| | | KRQLMNILGAVYRYKKLKEMSAEEKQKVIPRIVMVGGKAFATYTNAKRIVKVLNDVGAVVNNDPDVNKYLKVVFIPNYNVSVAEVLIPGSE |
| | | LSQHISTAGMEASGTSNMKFSLNGCVIIGTLDGANVEIREEVGEDNFFLFGAKADQVAGLRKDRENGLFKPDPRFEEAKQYIRSGTFGTYD |
| | | YIPLLDSLEGSGFGRGE |
| 89 | MN.215 | ........................................................................................... |
| | | ........................................RYRYGLFKQRIAKEGQEEIAEDWLEKFSPWEIVRHDVVYPVRFFGHVEISP |
| | | DGSRKSAGGEVLNALAYDVPIPGYKTKNAISLRLWDAKASAEDFNLEQFNDGQYESAAQLHSRAQQICAVLYPGDATEEGKLLRLKQQFFL |
| | | CSASLQDIIFRFKERKSDRVSGKWSEFPSKVAVQMNDTHPTLAIPELMRLLMDEEGLGWDEAWDVTNKTVAYTNHTVLPEALEKWSQSVMR |
| | | KLLPRQMEIIEEIDKRFREMVISTRKDMEGKLDSMSVLDNSPQKPVVRMANLCVVSAHTVNGVAELHSNILKEELFADYVSIWPKKFQNKT |
| | | NGITPRRWLRFCNPELSEIVTKWLNTDQWTSNLDLLTGLRKFADDEKLHAEWAAAKLASKKRLAKHVLDATGVTIDPTSLFDIQIKRIHEY |
| | | KRQLMNILGAVYRYKKLKEMSAEEKQKVIPRIVMVGGKAFATYTNAKRIVKVLNDVGAVVNNDPDVNKYLKVVFIPNYNVSVAEVLIPGSE |
| | | LSQHISTAGMEASGTSNMKFSLNGCVIIGTLDGANVEIREEVGEDNFFLFGAKADQVAGLRKDRENGLFKPDPRFEEAKQYIRSGTFGTYD |
| | | YIPLLDSLEGSGFGRGE |
| 89 | MN.207 | ..ISYRAHYSPHFSPLAEGPEPAYFATAESVRDHLLQNWNDTYLRFHETDFKQTYYISMEYLWSRALTNAVGNLGILGAYAEAVKKFGYEL |
| | | EALAGQERDMALGNGGLGRLAACFLDSMAILNLPAWGYGLRYRYGLFKQRIAKEGQEEIAEDWLEKFSPWEIVRHDVVYPVRFFGHVEILP |
| | | DGRRKSAGGEVLNALAYDVPIPGYKTKNAISLRLWDAKASAEDFNLEQFNDGQYESAAQLHSRAQQICAVLYPGDATEEGKLLRLKQQFFL |
| | | CSASLQDIIFRFKERKSDRVSGKWSEFPSKVAVQMNDTHPTLAIPELMRLLMDEEGLGWDEAWDVTNKTVAYTNHTVLPEALEKWSQSVMR |
| | | KLLPRQMEIIEEIDKRFREMVISTRKDMEGKLDSMSVLDNSPQKPVVRMANLCVVSAHTVNGVAELHSNILKEELFADYVSIWPKKFQNKT |
| | | NGIIPFRWLRFCNPHLSEIVINWLKT |
| 89 | MN.223 | ...................................................................................VKKFGYEL |
| | | EALAGQERDMALGNGGLGRLAACFLDSMAILNLPAWGYGLRYRYGLFKQRIAKEGQEEIAEDWLEKFSPWEIVRHDVVYPVRFFGHVEILP |
| | | DGRRKSAGGEVLNALAYDVPIPGYKTKNAISLRLWDAKASAEDFNLEQFNDGQYESAAQLHSRAQQICAVLYPGDATEEGKLLRLKQQFFL |
| | | CSASLQDIIFRFKERKSDRVSGKWSEFPSKVAVQMNDTHPTLAIPELMRLLMDEEGLGWDEAWDVTNKTVAYTNHTVLPEALEKWSQSVMR |
| | | KLLPRQMEIIEEIDKRFREMVISTRKDMEGKLDSMSVLDNSPQKPVVRMANLCVVSAHTVNGVAELHSNILKEELFADYVSIWPKKFQNKT |
| | | NGITPRRWLRFCNPELSEIVTKWLNTDQWTSNLDLLTGLRKFADDEKLHAEWAAAKLASKKRLAKHVLDATGVTIDPTSLFDIQIKRIHEY |
| | | KRQLMNILGAVYRYKKLKEMSAEEKQKVIPRIVMVGGKAFATYTNAKRIVKVLNDVGAVVNNDPDVNKYLKVVFIPNYNVSVAEVLIPGSE |
| | | LSQHISTAGMEASGTSNMKFSLNGCVIIGTLDGANVEIREEVGEDNFFLFGAKADQVAGLRKDRENGLFKPDPRFEEAKQYIRSGTFGTYD |
| | | YIPLLDSLEGSGFGRGDYFLVGYDFPSYIDAQARVDEAYKDKKRWIKMSILNTAGSGKFSSDRTIDQYAKEIWGITANPVP |
| 89 | MN.221 | ........................................................................................... |
| | | ..............RPRRRLAACFLDSMAILNLPAWGYGLRYRYGLFKQRIAKEGQEEIAEDWLEKFSPWEIVRHDVVYPVRFFGHVEILP |
| | | DGRRKSAGGEVLNALAYDVPIPGYKTKNAISLRLWDAKASAEDFNLEQFNDGQYESAAQLHSRAQQICAVLYPGDATEEGKLLRLKQQFFL |
| | | CSASLQDIIFRFKERKSDRVSGKWSEFPSKVAVQMNDTHPTLAIPELMRLLMDEEGLGWDEAWDVTNKTVAYTNHTVLPEALEKWSQSVMR |
| | | KLLPRQMEIIEEIDKRFREMVISTRKDMEGKLDSMSVLDNSPQKPVVRMANLCVVSAHTVNGVAELHSNILKEELFADYVSIWPKKFQNKT |
| | | NGITPRRWLRFCNPELSEIVTKWLNTDQWTSNLDLLTGLRKFADDEKLHAEWAAAKLASKKRLAKHVLDATGVTIDPTSLFDIQIKRIHEY |
| | | KRQLMNILGAVYRYKKLKEMSAEEKQKVIPRIVMVGGKAFATYTNAKRIVKVLNDVGAVVNNDPDVNKYLKVVFIPNYNVSVAEVLIPGSE |
| | | LSQHISTAGMEASGTSNMKFSLNGCVIIGTLDGANVEIREEVGEDNFFLFGAKADQVAGLRKDRENGLFKPDPRFEEAKQYIRSGTFGTYD |
| | | YIPLLDSLEGSGFGRGDYFLVGYDFPSYIDAQARVDEAYKDKKRWIKMSILNTAGSGKFSSDRTIDQYAKEIWGITANPVP |
| 89 | MN.222 | ........................................................................................... |
| | | ..............RPRRRLAACFLDSMAILNLPAWGYGLRYRYGLFKQRIAKEGQEEIAEDWLEKFSPWEIVRHDVVYPVRFFGHVEILP |
| | | DGRRKSAGGEVLNALAYDVPIPGYKTKNAISLRLWDAKASAEDFNLEQFNDGQYESAAQLHSRAQQICAVLYPGDATEEGKLLRLKQQFFL |
| | | CSASLQDIIFRFKERKSDRVSGKWSEFPSKVAVQMNDTHPTLAIPELMRLLMDEEGLGWDEAWDVTNKTVAYTNHTVLPEALEKWSQSVMR |
| | | KLLPRQMEIIEEIDKRFREMVISTRKDMEGKLDSMSVLDNSPQKPVVRMANLCVVSAHTVNGVAELHSNILKEELFADYVSIWPKKFQNKT |
| | | NGITPRRWLRFCNPELSEIVTKWLNTDQWTSNLDLLTGLRKFADDEKLHAEWAAAKLASKKRLAKHVLDATGVTIDPTSLFDIQIKRIHEY |
| | | KRQLMNILGAVYRYKKLKEMSAEEKQKVIPRIVMVGGKAFATYTNAKRIVKVLNDVGAVVNNDPDVNKYLKVVFIPNYNVSVAEVLIPGSE |
| | | LSQHISTAGMEASGTSNMKFSLNGCVIIGTLDGANVEIREEVGEDNFFLFGAKADQVAGLRKDRENGLFKPDPRFEEAKQYIRSGTFGTYD |
| | | YIPLLDSLEGSGFGRGDYFLVGYDFPSYIDAQARVDEAYKDKKRWIKMSILNTAGSGKFSSDRTIDQYAKEIWGITANPVP |
| 89 | MN.216 | ........................................................................................... |
| | | ..............RPRRRLAACFLDSMAILNLPAWGYGLRYRYGLFKQRIAKEGQEEIAEDWLEKFSPWEIVRHDVVYPVRFFGHVEILP |
| | | DGRRKSAGGEVLNALAYDVPIPGYKTKNAISLRLWDAKASAEDFNLEQFNDGQYESAAQLHSRAQQICAVLYPGDATEEGKLLRLKQQFFL |
| | | CSASLQDIIFRFKERKSDRVSGKWSEFPSKVAVQMNDTHPTLAIPELMRLLMDEEGLGWDEAWDVTNKTVAYTNHTVLPEALEKWSQSVMR |
| | | KLLPRQMEIIEEIDKRFREMVISTRKDMEGKLDSMSVLDNSPQKPVVRMANLCVVSAHTVNGVAELHSNILKEELFADYVSIWPKKFQNKT |
| | | NGITPRRWLRFCNPELSEIVTKWLNTDQWTSNLDLLTGLRKFADDEKLHAEWAAAKLASKKRLAKHVLDATGVTIDPTSLFDIQIKRIHEY |
| | | KRQLMNILGAVYRYKKLKEMSAEEKQKVIPRIVMVGGKAFATYTNAKRIVKVLNDVGAVVNNDPDVNKYLKVVFIPNYNVSVAEVLIPGSE |
| | | LSQHISTAGMEASGTSNMKFSLNGCVIIGTLDGANVEIREEVGEDNFFLFGAKADQVAGLRKDRENGLFKPDPRFEEAKQYIRSGTFGTYD |
| | | YIPLLDSLEGSGFGRGDYFLVGYDFPSYIDAQARVDEAYKDKKRWIKMSILNTAGSGKFSSDRTIDQYAKEIWGITANPVP |
| 90 | MN.162 | SIHIDTHARHAQSLPRKQKTHEAMALRILASKKTLAVALGGARPLATRGVATFTLPDLPYDYGALEPAISGEIMRLHHQKHHATYVANYNK |
| | | ALEQLDAAVSKGDASAVVQLQGAIKFNGGGHVNHSIFWKNLKPTNEGGGEAPHGKLGWAIDEDFGSFDKLVKKMNAEGAALQGSGWVWLAL |
| | | DKEAKKLSVETTANQDPLVIKGANLIPLLGIDVWEHAYYLQYKNVRPDYLTNIWKVVNWKYAGEEYENVAA |
| 90 | MN.142 | ...............RKQKTHEAMALRILASKKTLAVALGGARPLATRGVATFTLPDLPYDYGALEPAISGEIMRLHHQKHHATYVANYNK |
| | | ALEQLDAAVSKGDASAVVQLQGAIKFNGGGHVNHSIFWKNLKPTNEGGGEAPHGKLGWAIDEDFGSFDKLVKKMNAEGAALQGSGWVWLAL |
| | | DKEAKKLSVETTANQDPLVIKGANLIPLLGIDVWEHAYYLQYKNVRPDYLTNIWKVVNWKYAGEEYENVAA |
| 90 | MN.158 | .......ARHAQSLPRKQKTHEAMALRILASKKTLAVALGGARPLATRGVATFTLPDLPYDYGALEPAISGEIMRLHHQKHHATYVANYNK |
| | | ALEQLDAAVSKGDASAVVQLQGAIKFNGGGHVNHSIFWKNLKPTNEGGGEAPHGKLGWAIDEDFGSFDKLVKKMNAEGAALQGSGWVWLAL |
| | | DKEAKKLSVETTANQDPLVIKGANLIPLLGIDVWEHAYYLQYKNVRPDYLTNIWKVVNWKYAGEEYENVAA |
| 90 | MN.141 | ............................................LATRGVATFTLPDLPYDYGALEPAISGEIMRLHHQKHHATYVANYNK |
| | | ALEQLDAAVSKGDASAVVQLQGAIKFNGGGHVNHSIFWKNLKPTNEGGGEAPHGKLGWAIDEDFGSFDKLVKKMNAEGAALQGSGWVWLAL |
| | | DKEAKKLSVETTANQDPLVIKGANLIPLLGIDVWEHAYYLQYKNVRPDYLTNIWKVVNWKYAGEEYENVAA |
| 90 | MN.53 | ........................................................................................... |
| | | ..................................................................................GSGWVWLAL |
| | | DKEAKKLSVETTANQDPLVIKGANLIPLLGIDVWEHAYYLQYKNVRPDYLTNIWKVVNWKYAGEEFFFFF |
| 90 | MN.111 | ........RHAQSLPRKQKTHEAMALRILASKKTLAVALGGARPLATRGVATFTLPDLPYDYGALEPAISGEIMRLHHQKHHATYVANYNK |
| | | ALEQLDAAVSKGDASAVVQLQGAIKFNGGGHVNHSIFWKNLKPTNEGGGEAPHGKLGWAIDEDFGSFDKLVKKMNAEGAALQGSGWVWLAL |
| 90 | MN.112 | ........................................................................................... |
| | | .................................HSIFWKNLKPTNEGGGEAPHGKLGWAIDEDFGSFDKLVKKMNAEGAALQGSGWVWLAL |
| | | DKEAKKLSVETTANQDPLVIKGANLIPLLGIDVWEHAYYLQYKNVRPDYLTNIWKVVNWKYAGEEYENVAAEYFV |
| 91 | MN.120 | ............PGDRPSEMANNPKVFFDVTIGGAPAGRIVMELYADVVPKTAENFRALCTGEKGVGKMGKPLHYKGSSFHRVIPGFMCQG |
| | | GDFTAGNGTGGESIYGAKFADENFIKKHTGEGVLSMANAGPGINGSQFFLCTAKTAWLDGKHVVFGQVVEGMDVVKAVEKVGSQSGRCSKP |
| | | VVIADCGQL |
| 91 | MN.130 | RNPNPQTPASTDPGDRASEMANNPKVFFDVTIGGAPAGRIVMELYADVVPKTAENFRALCTGEKGVGKMGKPLHYKGSSFHRVIPGFMCQG |
| | | GDFTAGNGTGGESIYGAKFADENFIKKHTGEGVLSMANAGPGINGSQFFLCTAKTAWLDGKHVVFGQVVEGMDVVKAVEKVGSQSGRCSKP |
| | | VVIADCGQL |
| 91 | MN.132 | ...................MAPNPKVFFDVTIGGAPAGRIVMELYADVVPKTAENFRALCTGEKGVGKMGKPLHYKGSSFHRVIPGFMCQG |
| | | GDFTAGNGTGGESIYGAKFADENFIKKHTGEGVLSMANAGPGINGSQFFLCTAKTAWLDGKHVVFGQVVEGMDVVKAVEKVGSQSGRCSKP |
| | | VVIADCGQL |
| 91 | MN.127 | ...................MAPNPKVFFDVTIGGAPAGRIVMELYADVVPKTAENFRALCTGEKGVGKMGKPLHYKGSSFHRVIPGFMCQG |
| | | GDFTAGNGTGGESIYGAKFADENFIKKHTGEGVLSMANAGPGINGSQFFLCTAKTAWLDGKHVVFGQVVEGMDVVKAVEKVGSQSGRCSKP |
| | | VVIADCGQL |
| 91 | MN.121 | ...................MAPNPKVFFDVTIGGAPAGRIVMELYADVVPKTAENFRALCTGEKGVGKMGKPLHYKGSSFHRVIPGFMCQG |
| | | GDFTAGNGTGGESIYGAKFADENFIKKHTGEGVLSMANAGPGINGSQFFLCTAKTAWLDGKHVVFGQVVEGMDVVKAVEKVGSQSGRCSKP |
| | | VVIADCGQL |
| 91 | MN.139 | ...................MAPNPKVFFDVTIGGAPAGRIVMELYADVVPKTAENFRALCTGEKGVGKMGKPLHYKGSSFHRVIPGFMCQG |
| | | GDFTAGNGTGGESIYGAKFADENFIKKHTGEGVLSMANAGPGINGSQFFLCTAKTAWLDGKHVVFGQVVEGMDVVKAVEKVGSQSGRCSKP |
| | | VVIADCGQL |
| 91 | MN.146 | ...................MAPNPKVFFDVTIGGAPAGRIVMELYADVVPKTAENFRALCTGEKGVGKMGKPLHYKGSSFHRVIPGFMCQG |
| | | GDFTAGNGTGGESIYGAKFADENFIKKHTGEGVLSMANAGPGINGSQFFLCTAKTAWLDGKHVVFGQVVEGMDVVKAVEKVGSQSGRCSKP |
| | | VVIADCGQL |
| 91 | MN.64 | ........................................................................................... |
| | | ................AKFADENFIKKHTGEGVLSMANAGPGINGSQFFLCTAKTAWLDGKHVVFGQVVEGMDVVKAVEKVGSQSGRCSKP |
| | | VVIADCGQL |
| 91 | MN.87 | .................................................................................PLKWSGFMCQG |
| | | GDFTKGNGTGGESIYGAKFADENFIKKHTGEGVLSMANAGPGINGSQFFLCTAKTAWLDGKHVVFGQVVEGMDVVKAVEKVGSQSGRCSKP |
| | | VVIADCGQL |
| 91 | MN.89 | ............................................................................GSSFHRVIPDFMCQG |
| | | GDFTKGNGTGGESIYGAKFADENFIKKHTGEGVLSMANAGPGINGSQFFLCTAKTAWLDGKHVVFGQVVEGMDVVKAVEKVGSQSGRCSKP |
| | | VVIADCGQL |
| 92 | MN.37 | EQVHIRRPGGAGEDGGQLLLLRIPSLLHGGHGCAWPAMEREKRIEWNCDVCRHGDDKKKVD |
| 93 | MN.164 | WITVMRASCGHHRFRDCVISSLADFKLFPVLQHIISIAVLAIFIGLLMIEDIGA |

TABLE 2
Panel of peptides predicted from protein sequences identified by
transcriptomic anaylsis of Timothy Grass (TG) pollen.

| peptide_sequence | | |
|---|---|---|
| (SEQ ID | | |
| NOS. 621-1442) | protein_Id | ORF (start-stop) |
| SDGTFAFAAVPSGAS | 1 | M.125 (11-25), M.151 (38-52), M.226 (44-58), M.291 (11-25), M.331 (11-25), M.399 (44-58), M.414 (39-53), M.418 (43-57), |
| | | M.498 (38-52), M.617 (8-22), M.624 (31-25), M.689 (37-51), M.704 (8-22), M.714 (33-47), M.721 (11-25) |
| FAAVPSGASTGVYEA | 1 | M.125 (17-31), M.151 (44-58), M.266 (50-64), M.291(17-31), M.331(17-31), M.399 (50-64), M.414 (45-59), M.418 (49-63) |
| | | M.498 (44-58), M.617 (14-28), M.624 (17-31), M.689 (43-57), M.704 (14-28), M.714 (39-53), M.721 (17-31) |
| GASTGVYEALELRDG | 1 | M.125 (23-37), M.151 (50-64), M.226 (56-70), M.291 (23-37), M.331 (23-37), M.399 (56-70), M.414 (51-65), M.418 (55-69) |
| | | M.498 (50-64), M.617 (20-34), M.624 (23-37), M.689 (49-63), M.704 (20-34), M.714 (45-59), M.723 (23-37) |
| LGKGVLKGNRANVEL | 1 | M.125 (42-56) |
| NRANVELFMIAVLLA | 1 | M.125 (50-64) |
| QTELDNFMVHQLDGT | 1 | M.291 (69-83), M.331 (69-83), M.399 (102-116), M.414 (97-111), M.418(101-115), M.498 (96-110), M.617 (66-80), M.624 |
| | | (69-83), M.644 (30-44), M.689 (95-109), M.692 (29-43), M.693 (30-44), M.704 (66-80), M.705 (29-43), M.714 (91-105), |
| | | M.721(69-83) |
| CKQKVFFNISADADA | 1 | M.331 (90-104) |
| PAMAATIQSVKARQI | 1 | M.151 (8-22), M.226 (14-28), M.399 (14-28), M.418 (13-27), M.498 (8-22), M.689 (7-21), M.714 (3-17) |
| | | M.291 (50-64), M.331 (50-64), M.399 (83-97), M.414 (78-92), M.498 (77-91), M.617 (47-63), M.624 (50-64), M.644 (11-25) |
| VDNVNEIIGFALIGK | 1 | M.692 (10-24), M.693 (11-25), M.704 (47-61), M.714 (72-86) |
| KLGANAILAVSLAVC | 1 | M.414 (121-135), M.418 (125-139), M.498 (120-134), M.617 (90-104), M.624 (93-107), M.644 (54-68), M.689 (119-133), |
| | | M.692 (53-67), M.693 (54-68), M.704 (90-104), M.705 (53-67), M.714 (115-129), M.721 (93-107) |
| KKIFLYQKIANLAGN | 1 | M.414 (142-156), M.418 (146-160), M.498 (141-155), M.561 (12-26), M.603(12-26), M.604 (16-30), M.617 (111-125), |
| | | M.624 (114-128), M.644 (75-89), M.689 (140-154), M.692 (74-88), M.693 (75-89), M.704 (111-125), M.705 (74-88), M.714 |
| | | (136-150), M.721 (114-128) |
| GNKQLVLPVPAFNVI | 1 | M.498 (154-168), M.561 (25-39), M.591 (4-18), M.603 (25-39), M.604 (29-43), M.617 (124-138), M.624 (127-141), M.644 |
| | | (88-102), M.689 (153-167), M.692 (87-101), M.693 (88-102), M.704 (124-138), M.705 (87-101), M.714 (149-163), M.721 |
| | | (127-141) |
| KLAMQEFMILPTGAS | 1 | M.498 (177-191), M.561 (48-62), M.591 (27-41), M.603 (48-62), M.604 (52-66), M.617 (147-161), M.624 (150-164), M.644 |
| | | (111-125), M.689 (176-190), M.692 (110-124), M.693 (111-125), M.704 (147-161), M.705 (110-124), M.714 (172-186), |
| | | M.721 (150-164) |
| KMGVEVYHNLKSVIK | 1 | M.498 (198-212), M.561 (69-83), M.591 (48-62), M.603 (69-83), M.604 (73-87), M.617 (168-182), M.624 (171-185), M.644 |
| | | (132-146), M.689 (197-211), M.692 (131-145), M.693 (132-146), M.704 (168-182), M.705 (131-145), M.714 (193-207), |
| | | M.721 (171-185) |
| GKVVIGMDVAASEFY | 1 | M.561 (124-136), M.591 (101-117), M.603 (124-136), M.604 (126-142), M.617 (223-237), M.624(226-240), M.644 (187- |
| | | 201), M.689 (252-266), M.692 (186-200), M.693 (187-201), M.704 (223-237), M.705 (186-200), M.714 (248-262), M.721 |
| | | (226-240) |
| VYKSFVSEYPIVSIE | 1 | M.561 (168-182), M.591 (147-161), M.603 (168-182), M.604 (172-186), M.617 (267-281), M.624 (270-284), M.644 (231- |
| | | 245), M.689 (296-310), M.692 (230-244), M.693 (231-245), M.704 (267-281), M.705 (230-244), M.714 (292-603), M.721 |
| | | (270-284) |
| IVGDDLLVTNPTRVA | 1 | M.561 (206-220), M.591 (185-199), M.603 (206-220), M.604 (210-224), M.617 (305-319), M.624 (308-122), M.644 (269- |
| | | 283), M.689 (334-348), M.692 (268-282), M.693 (269-283), M.704 (305-319), M.705 (268-282), M.714 (330-344), M.721 |
| | | (308-322) |
| NALLLKVNQIGSVTE | 1 | M.561 (229-243), M.591 (208-222), M.603 (229-243), M.604 (233-247), M.644 (292-306), M.689 (357-371), M.692 (291- |
| | | 305), M.693 (292-306), M.704 328-342), M.705 (291-305), M.714 (353-367), M.721 (331-345) |
| ETEDIFTALLAVGLS | 1 | M.591 (245-259), M.603 (266-280), M.604 (270-284), M.644 (329-343), M.692 (328-342), M.693 (329-343), M.704 (635- |
| | | 379), M.708 (328-342), M.714 (390-404), M.721 (368-382) |
| ERLAKYNQLLRIEEE | 1 | M.591 (272-286), M.603 (293-307), M.604 (297-311), M.692 (355-369), M.693 (356-370), M.704 (392-406), M.705 (355- |
| | | 369), M.714 (417-431), M.721 (395-409) |
| LGAAAVYAGLKERAE | 1 | M.692 (370-384), M.693 (371-385), M.705 (370-384), M.721 (410-424) |
| ADPCSEYFVEAYLNN | 58 | M.203 (12-26), M.329 (11-25), M.330 (2-16) |
| YFVEAYLNNPLVQKA | 58 | M.203 (18-32), M.329 (17-31), M.330 (8-27) |
| VQKATHANTALNYPW | 58 | M.130 (4-18), M.131 (4-18), M.203 (29-43), M.316 (4-18), M.323 (3-17), M.329 (28-42), M.330 (19-33), M.345 (3-17) |
| PSMLAHIKALVIFGI | 58 | M.130 (36-50), M.131 (38-50), M.203 (61-75), M.292 (31-45), M.316 (36-50), 329 (60-74), M.70 (31-45) |
| LYSGDLDAMVPVTAS | 58 | M.128 (48-62), M.227 (47-61), M.316 (54-68) |
| LNYPWTGCFTFTYNL | 58 | M.128 (8-22), M.330 (14-28), M.131 (14-28), M.203 (39-53), M.227 (7-21), M.292 (9-23), M.316 (14-28), M.123 (13-27), |
| | | M.329 (38-52), M.330 (29-43), M.345 (13-27), M.70 (9-23) |
| YLNRRFGASPPSMLA | 58 | M.345 (25-39) |
| HIKALVTTASAEGCT | 58 | M.323 (40-54), M.345 (40-54) |
| QEMAYWSLKAAIETG | 33 | M.365 (0-14) |
| DAASSLYLFGENLPR | 33 | M.365 (19-33) |
| GYNISLASMIPDYDT | 33 | M.241 (0-14), M.289 (1-15) |
| YDIVITNVRRSLAVA | 33 | M.172 (0-14), M.214 (12-26), M.239 (9-23), M.240 (7-21), M.289 (13-27), M.296 (26-40), M.365 (71-85), M.72 (0-14) |
| LEKIVAILSAFVDAA | 33 | M.172 (44-58), M.214 (56-70), M.240 (51-65), M.289 (57-71), M.38 (35-49) |
| NVFFSLAVAKKNHLA | 33 | M.172 (6-20), M.214 (16-32), M.239 (18-29), M.240 (13-27), M.289 (19-33), M.296 (32-46), M.365 (77-91), M.72 (6-20) |
| VAKKNHLAWNCERCR | 33 | M.172 (13-27), M.187 (13-27), M.214 (25-39), M.239 (22-36), M.240 (20-34), M.289 (26-40), M.296 (39-53), M.365 (84-98), |
| | | M.38 (4-18), M.72 (13-27) |
| LAWNCEPCRKGESKK | 33 | M.172 (19-33), M.187 (19-33), M.214 (31-45), M.239 (28-42), M.240 (26-40), M.289 (32-45), M.295 (45-59), M.385 (90- |
| | | 304), M.38 (10-24), M.72 (19-38) |
| KKTVDAILSAFVDAA | 33 | M.72 (32-46) |
| GSGDEKTIKEALAKV | 21 | M.178 (0-14), M.191 (0-14), M.29 (1-15) |
| MYVMYIKEGTYKEYV | 21 | M.107 (9-23), M.133 (7-21), M.166 (10-24), M.123 (9-23), M.129 (10-24), M.149 (10-24), M.164 (10-24), M.174 (3-17), |
| | | M.178 (21-35), M.191 (21-35), M.29 (22-36), M.3 (4-18) |
| YKEYVTVPRTVTNLV | 21 | M.107 (19-33), M.113 (17-31), M.116 (20-34), M.123 (19-33), M.129 (20-34), M.149 (20-34), M.164 (20-34), M.174 (3-17), |
| | | M.178 (31-45), M.191 (31-45), M.29 (32-45), M.3 14-28) |
| VTNLVMIGDGAAKTI | 21 | M.107 (29-43), M.113 (27-41), M.116 (30-44), M.123 (29-43), M.129 (30-44), M.149 (30-44), M.164 (30-44), M.174 (23-37), |
| | | M.178 (41-55), M.191 (41-55) |
| NFKMNLTSMVAVSLV | 21 | M.123 (49-63) |
| YQDTLYTHAQRQFFR | 21 | M.101 (36-50), M.146 (49-63), M.165 (51-65), M.183 (36-50), M.204 (49-63), M.34 (19-33) M.6 (17-31) |
| GTIDFTFGNEQVVIQ | 21 | M.183 (56-70) |
| AKTIILKFLLPVMIV | 21 | M.178 (52-66) |
| ALTHTTIVASGTENM | 8 | M.763 (0-14) |
| MKIFTRIWVLLLLVV | 8 | M.763 (14-28), M.765 (11-25) |
| LLLLVVLLFEGCLAK | 8 | M.763 (23-37), M.765 (20-34) |
| KDTHYTLSAWLQLSK | 8 | M.733 (16-30), M.759 (57-71), M.763 (109-123), M.765 (106-120) |
| GKGELFFETNVIAEL | 8 | M.653 (28-42), M.728 (34-48), M.733 (72-86), M.759 (113-127), M.763 (165-179), M.765 (162-176) |
| VTAELMVDSMSLQPF | 8 | M.653 (38-52), M.728 (44-58), M.733 (82-96), M.763 (175-189) |
| YEKWFTSRFTVATME | 8 | M.653 (115-129), M.728 (121-135), M.733 (159-173), M.747 (73-87), M.759 (199-213), M.763 (252-266), M.765 (248-262) |
| KQMDWVSKLSAPQLK | 8 | M.653 (175-189), M.728 (181-195), M.733 (219-233), M.747 (133-147), M.759 (259-273), M.763 (312-326), M.765 (308- |
| | | 322) |
| KPILFMNEYNTIEEP | 8 | M.653 (244-258), M.728 (250-264), M.733 (288-302), M.747 (202-216), M.759 (328-342), M.763 (318-395), M.765 (377- |
| | | 391) |
| TKYLAKLKQIQSYPG | 8 | M.653 (266-280), M.728 (272-286), M.733 (310-324), M.747 (224-238), M.759 (350-364), M.763 (403-417), |
| | | M.763 (403-417), M.765 (399-413) |
| PYVRGELDTLAQAKV | 8 | M.653 (300-314), M.728 (306-320), M.733 (344-358), M.747 (258-272), M.759 (384-398), M.763 (437-451), M.765 (433- |
| | | 447) |
| PKQVEYLEEVMREGF | 8 | M.653 (327-341), M.728 (333-347), M.733 (371-385), M.747 (285-299), M.759 (411-425), M.763 (464-478), M.765 (460- |
| | | 474) |
| NVTAELVDSMSLQPF | 8 | M.759 (122-136), M.765 (171-185) |
| NIPATWGAMEKLYDA | 18 | M.8 (0-14) |
| GAMENLYDAGKRAT | 18 | M.8 (6-20) |
| KARAIGVSNLASKKL | 18 | M.8 (16-30) |
| VSNLASNKLGDLLAV | 18 | M.8 (22-36) |
| KKLGDLLAVAARIPPA | 18 | M.8 (28-42) |
| SVFKKFPKFRRVLVI | 55 | M.110 (3-17), M.173 (11-25), M.249 (13-27) |
| PKFRRVLVIDPVISG | 55 | M.110 (9-23), M.173 (17-31), M.18 (4-18), M.249 (19-33), M.33 (0-14), M.50 (9-23) |
| IGEINGFADAVMVEA | 55 | M.110 (29-43), M.173 (37-51), M.18 (24-38), M.249 (39-53), M.33 (20-34), M.50 (29-43) |
| FADAVMVSRGSLVRV | 55 | M.110 (35-49), M.173 (43-57), M.18 (30-44), M.249 (45-59), M.33 (26-40), M.50 (35-49) |
| VSRGSLVAVNGFFLT | 55 | M.110 (41-55), M.249 (51-65), M.33 (32-45), M.50 (41-55) |
| VNGFFLTGFNDLVTE | 55 | M.249 (59-73) |
| QIIRNGFYLTKNVEH | 31 | M.39 (5-19) |
| FYLTRNVEHKGQVDL | 31 | M.39 (11-25) |
| VENKGQVDLVTETDK | 31 | M.39 (17-31) |
| TDKACEDLIFNHLRK | 31 | M.39 (29-43) |
| DLIFNHLAKLYPDHK | 31 | M.39 (35-49) |
| AEFEGVFLDFARQQA | 2 | M.574 (0-14) |
| VDKLFKLAEAAKLKE | 2 | M.574 (19-33) |
| ENRSVLHVALRAPRD | 2 | M.422 (8-22), M.431 (8-22), M.473 (0-14), M.574 (48-62), M.634 (24-38), M.676 (24-38) |
| FLGPLFVATALQTDP | 2 | M.367 (54-68), M.422 (75-89), M.431 (75-89), M.437 (36-50), M.473 (67-81), M.574 (115-129), M.610 (32-46), M.634 (91- |
| | | 105), M.676 (91-105), M.722 (32-46) |
| RQLRFLANVDPVDVA | 2 | M.387 (77-91), M.422 (98-112), M.431 (98-112), 437 (59-73), M.473 (90-140), M.531 (8-22), M.574 (138-152), M.610 |
| | | (55-69), M.634 (114-128), M.676 (114-128), M.722 (55-69) |
| VVSKIFTTAETMLNA | 2 | M.387 (106-120), M.422 (127-141), M.431 (127-141), M.437 (88-102), M.473 (119-133), M.531 (37-51), M.574 (167-181), |
| | | M.610 (84-98), M.634 (143-157), M.676 (143-157), M.722 (84-98) |
| IKEWVSSLGPQAVS | 2 | M.387 (123-137), M.431 (144-158), M.437 (105-119), M.473 (136-150), M.531 (54-68), M.574 (184-198), M.610 (101-115), |
| | | M.634 (160-174), M.676 (160-174), M.722 (101-115) |
| VSKHMIAVSTNLKLV | 2 | M.473 (118-132), M.473 (149-163), M.531 (67-81), M.574 (197-211), M.610 (114-128), M.634 (173-187), M.676 (173-187) |
| | | M.722 (114-128) |
| RYSVCSAVGVLPLSL | 2 | M.473 (152-166), M.473 (183-197), M.531 (101-115), M.574 (231-245), M.610 (148-162), M.634 (207-221), M.676 (207- |
| | | 221), M.722 (148-162) |
| AVGVLPLSLQYGFPI | 2 | M.533 (107-121), M.574 (237-251), M.610 (154-168), M.534 (213-227), M.676 (213-227), M.722 (154-168) |
| LSLQYGFPIVQRFLE | 2 | M.531 (113-127), M.574 (243-257), M.610 (160-174), M.634 (219-233), M.676 (219-233), M.722 (160-174) |
| FFIVQRFLEGASSTD | 2 | M.531 (119-133), M.574 (249-263), M.610 (166-180), M.634 (226-239), M.636 (2-16), M.676 (225-239), M.722 (166-180) |
| HFRTASFEKNIPVLL | 2 | M.531 (135-149), M.574 (265-279), M.610 (182-196), M.634 (241-255), M.636 (18-32), M.676 (241-255), M.722 (182-196) |
| VLLGLLSVWNVSELQ | 2 | M.531 (147-161), M.610 (194-208), M.634 (253-267), M.636 (30-44), M.676 (253-267), M.722 (194-208) |
| SVWNVSFLGYPARAI | 2 | M.531 (153-167), M.610 (200-214), M.634 (259-273), M.636 (36-50), M.676 (259-273), M.722 (200-214) |
| ARAILFYSQALENLA | 2 | M.531 (164-178), M.610 (211-255), M.634 (270-284), M.636 (47-61), M.676 (270-284), M.277 (211-225) |
| NGQHSFYQLIHQGRV | 2 | M.531 (215-299), M.610 (262-276), M.634 (321-355), M.636 (98-112), M.676 (321-335), M.722 (262-276) |
| CQFIGVIKSQQPVYL | 2 | M.531 (232-246), M.610 (279-293), M.636 (115-129), M.676 (338-352), M.722 (279-293) |
| ELMSNFFAQPDALAY | 2 | M.610 (303-317), M.636 (139-153), M.676 (362-376) |
| NTEKGNRPSLSFLLS | 2 | M.363 (173-187), M.722 (337-351) |
| PSLSFLLSSLSAYEI | 2 | M.636 (180-194), M.722 (355-358) |
| AYEIGQLLAIYEHRI | 2 | M.636 (191-205), M.722 (358-369) |
| LLAIYEHRIAVQGFI | 2 | M.636 (197-211), M.722 (631-375) |
| QQFIWGTNSFDQWQV | 2 | M.636 (208-222), M.722 (372-386) |
| PVEGFNPSSASLLAR | 2 | M.636 (245-259), M.722 (409-423) |
| PSSASSLLARYLAVEP | 2 | M.636 (251-265), M.722 (415-429) |
| NELGGKILRQPGPLP | 56 | M.25 (1-15) |
| ILRQPGPLPGLNTRI | 56 | M.25 (7-21) |
| LRGNLTNIASFLDPD | 56 | M.25 (5-19) |
| NIASFLDPLGWRVVL | 56 | M.25 (20-34), M.5 (11-25) |
| GWKVVLVDHADFLKE | 56 | M.25 (29-43), M.5 (20-34) |
| QDNAKIVQTDSSIQA | 57 | M.394 (2-16) |
| RLVCLRVHPTFTLLH | 57 | M.394 (28-42) |
| HFTFILLHPTEVVVA | 57 | M.394 (35-49) |
| TEVVVAFTAINGSRQ | 57 | M.394 (44-58) |
| LVNRFEISQVSKCLV | 57 | M.394 (90-104) |
| ILLVFAETAEPEVKV | 3 | M.305 (0-14) |
| EPEVKVVDLTILSPD | 3 | M.212 (7.21), M.271 (3-17), M.282 (14-28), M.288 (3-17), M.305 (9-23) |
| LKDGSTYSFRFSFIV | 3 | M.212 (42-56), M.271 (38-52), M.282 (49-63) M.288 (38-52) M.305 (44-58) |
| SFRFSFIVSNNIVEG | 3 | M.212 (49-63), M.271 (45-59), M.282 (56-70), M.285 (1-15), M.288 (45-59), M.305 (51-65), M.348 (1-15) |
| DDGKVYLEMSYYFEI | 3 | M.519 (45-59), M.285 (74-88), M.287 (51-65), M.348 (74-88), M.83 (27-41) |
| VKNIVIVLNEAHVPS | 59 | M.596 (20-34), M.660 (8-22), M.674 (35-49), M.685 (35-49), M.703 (34-48) |
| EDAVEVVVSPPFVFL | 59 | M.585 (49-63), M.596 (35-49), M.660 (23-37), M.674 (50-64), M.681 (49-63), M.685 (50-64), M.703 (49-63) |
| VSPPFVFLQQAKALL | 59 | M.504 (1-15), M.585 (56-70), M.596 (42-56), M.660 (30-44), M.674 (57-71), M.681 (56-70), M.685 (57-71), M.703 (56-70) |
| FLQQAKALLRPDFAV | 59 | M.504 (7-21), M.585 (62-76), M.596 (48-62), M.660 (36-50), M.674 (63-77), M.681 (62-76), M.685 (63-77), M.703 (62-76) |
| ALLRPDFAVAAQNCW | 59 | M.585 (68-82), M.596 (54-68), M.660 (42-56), M.674 (69-83), M.681 (68-82), M.685 (69-83), M.703 (68-82) |
| GAFTGEISAEMLVNL | 59 | M.504 (32-46), M.585 (87-101), M.596 (73-87), M.660 (61-75), M.674 (88-102), M.681 (87-101), M.685 (88-102), M.703 |
| | | (87-101) |
| ISAEMLVNLQVPWVI | 59 | M.504 (38-52), M.585 (93-107), M.596 (79-93), M.660 (67-81), M.674 (94-108), M.681 (93-107), M.685 (94-108), M.703 |
| | | (93-107) |
| ESNDFVADKVAYALA | 59 | M.504 (64-78), M.585 (119-133), M.596 (105-119), M.660 (93-107), M.674 (120-134), M.681 (119-133), M.685 (120-134), |
| | | M.703 (119-133) |
| ADKVAYALAQGLKVI | 59 | M.504 (70-84), M.585 (125-139), M.596 (111-125), M.660 (99-113), M.674 (126-140), M.681 (125-139), M.685 (126-140), |
| | | M.703 (125-139) |
| IIMEVVAAQTKAIAE | 59 | M.504 (98-112), M.526 (13-27), M.585 (153-167), M.596 (139-153), M.660 (127-141), M.674 (154-168), M.681 (153-167), |
| | | M.685 (154-168), M.703 (153-167) |
| WINVVLAYEPVWAIG | 59 | M.504 (117-131), M.526 (32-46), M.585 (172-186), M.596 (158-172), M.660 (146-160), M.674 (173-187), M.681 (172-185), |
| | | M.685 (173-187), M.703 (172-186) |
| LRKWLHANVGPAVAE | 59 | M.504 (148-162), M.526 (63-77), M.585 (203-217), M.596 (189-203), M.660 (177-191), M.674 (204-218), M.681 (203-217), |
| | | M.685 (204-218), M.703 (203-217) |
| PEFVDIIKEATVKSS | 59 | M.504 (198-232), M.526 (113-127) M.585 (253-267), M.596 (239-253), M.660 (227-241), M.674 (254-268), M.681 (253-267), |
| | | M.685 (254-268), M.703 (253-267) |
| LNGPFIATVQQRGAA | 19 | M.235 (25-39) |
| QQRGAAIIKARKLSS | 19 | M.235 (34-48) |
| IIKARKLSSALSAAS | 19 | M.235 (40-54) |
| LSSALSAASSACDHI | 19 | M.235 (46-60) |
| GTPEGTFVSMGVYSD | 19 | M.235 (66-80) |
| IEIDSLFEGIDFYST | 32 | M.389 (40-54), M.390 (40-54) |
| IDFYSTITRARFEEL | 32 | M.389 (49-63), M.390 (49-63) |
| IPKVQQLLQDFFNGK | 32 | M.144 (40-54), M.201 (44-58), M.28 (26-40), M.284 (52-56), M.303 (52-66), M.389 (101-115), M.390 (101-115), M.74 (19-33), |
| | | M.92 (34-48) |
| EAVAYGAAVQAAILS | 32 | M.284 (76-90), M.303 (76-90), M.317 (7-21), M.389 (125-139), M.390 (125-139), M.74 (43-57) |
| VQDLLLIDVIFLSLG | 32 | M.180 (11-25), M.317 (28-42) |
| LMSFSWICACVRAAA | 34 | M.607 (0-14) |
| ICACVRAAAVAWEAG | 34 | M.607 (6-20), M.690 (4-18) |
| VRVKILFTALCHIDV | 34 | M.598 (34-48), M.607 (68-52), M.614 (13-27), M.632 (27-41), M.672 (23-37), M.690 (36-50) |
| MCDLLRINTDRGVMI | 34 | M.545 (18-32), M.598 (109-123), M.607 (113-127), M.614 (88-102), M.616 (47-61), M.632 (102-116), M.633 (42-56), M.671 |
| | | (43-57), M.672 (98-112), M.690 (111-125) |
| KPIFHFVGTSTFSEY | 34 | M.545 (44-58), M.598 (135-149), M.607 (139-153), M.614 (114-128), M.616 (73-87), M.632 (128-142), M.633 (68-82), |
| | | M.671 (69-83), M.672 (124-138), M.690 (137-151) |
| VGISTFSEYTVMHVG | 34 | M.545 (50-64), M.598 (141-155), M.607 (145-159), M.614 (120-134), M.616 (79-93), M.632 (134-148), M.633 (74-88) |
| | | M.671 (75-89), M.672 (130-144), M.690 (143-157) |
| VAIFGLGAVGLAAAE | 34 | M.545 (104-118), M.598 (195-209), M.607 (199-213), M.614 (174-188), M.616 (133-147), M.632 (188-202), M.633 (128-142), |
| | | M.671 (129-143), M.672 (184-198), M.690 (197-211) |
| GAVGLAAAEGARIAG | 34 | M.545 (110-124), M.598 (201-215), M.607 (205-219), M.614 (180-194), M.616 (139-153), M.632 (184-208), M.633 (134-148), |
| | | M.671 (135-149), M.672 (190-204), M.690 (203-217) |
| GNINAMIQAFECVHD | 34 | M.545 (179-193), M.598 (270-284), M.607 (274-288), M.614 (249-263), M.616 (208-222), M.622 (263-277), M.633 (203-217), |
| | | M.671 (204-218), M.672 (259-273), M.690 (272-286) |
| LEGTFFGNFKPRTDL | 34 | M.545 (223-237), M.614 (293-307), M.616 (252-266), M.632 (307-321), M.633 (247-261), M.671 (248-262), M.672 (303-317), |
| | | M.690 (316-330) |
| KFITHSVTFSEINKA | 34 | M.616 (282-296), M.633 (277-291), M.671 (278-292), M.672 (333-347), M.690 (346-360) |
| VIFSEINKAFDLMAK | 34 | M.616 (288-302), M.633 (283-297), M.671 (284-298), M.672 (339-353), M.690 (352-366) |
| ALRWNLQMGHSVLPK | 35 | M.272 (0-14) |
| NLDVYDWSIPDDLLA | 35 | M.272 (24-38) |
| DDLLAKFSEIKQTRL | 35 | M.272 (34-48) |
| FSEIKQTRLLMGNFI | 35 | M.272 (40-54) |
| IRLLMGNFIVNKDSV | 35 | M.272 (46-60) |
| MKIIFDEESIKELLA | 4 | M.595 (2-16), M.648 (2-16), M.715 (0-14), M.718 (2-16), M.720 (2-16), M.725 (0-14) |
| FESIKKLLASPKFSF | 4 | M.595 (8-22), M.648 (8-22), M.662 (7-21), M.694 (11-25), M.701 (11-25), M.715 (6-20), M.718 (8-22), M.720 (8-22), M.723 |
| | | (5-19), M.725 (6-20) |
| RMFVDELGASESSLL | 4 | M.595 (37-51), M.648 (67-51), M.662 (36-50), M.694 (40-54), M.701 (40-54), M.715 (35-49), M.718 (37-51), M.720 (37-51), |
| | | M.273 (34-48), M.725 (35-49) |
| PNLTYAKELVERMGL | 4 | M.595 (66-80), M.648 (66-80), M.662 (65-79), M.694 (69-83), M.701 (69-83), M.715 (64-78), M.718 (66-80), M.720 (66-820), |
| | | M.723 (63-77), M.725 (64-78) |
| RNMVLGNRFFVTPSD | 4 | M.595 (102-116), M.648 (102-116), M.662 (101-115), M.594 (105-119), M.701 (105-119), M.715 (100-114), M.718 (102-116), |
| | | M.720 (102-116), M.723 (99-113), M.725 (100-114) |
| KRFFVTPSDSVAIIA | 4 | M.595 (108-122), M.648 (108-122), M.662 (107-121), M.694 (111-125), M.701 (111-125), M.715 (106-120), M.718 (108-122), |
| | | M.720 (108-122), M.723 (105-119), M.725 (106-120) |
| SDSVAIIAANAVQSI | 4 | M.595 (115-129), M.648 (115-129), M.662 (114-128), M.694 (118-132), M.701 (118-132), M.715 (113-127), M.718 (115-129) |
| | | M.720 (115-129), M.723 (112-126), M.725 (113-127) |
| AVQSIPYFASGLKGV | 4 | M.595 (125-139), M.648 (125-139), M.662 (124-138), M.694 (128-142), M.701 (128-142), M.715 (123-137), M.718 (125-139), |
| | | M.720 (125-139), M.723 (122-136), M.725 (123-137) |
| ENLNLKFEEVPIGWK | 4 | M.595 (154-168), M.648 (154-168), M.662 (153-167), M.694 (157-171), M.701 (157-171), M.715 (152-166), M.718 (154-168), |
| | | M.720 (154-168), M.723 (151-165), M.725 (152-166) |
| GIWAVLAWLSTTAYK | 4 | M.576 (33-47), M.595 (199-213), M.648 (199-213), M.662 (198-212), M.694 (202-216), M.701 (202-216), M.715 (197-211), |
| | | M.718 (199-213), M.720 (199-213), M.723 (196-210), M.725 (197-211) |
| NLGGDKLVSVEDIVL | 4 | M.576 (51-65), M.595 (217-231), M.648 (217-231), M.662 (216-230), M.694 (220-234), M.701 (220-234), M.715 (215-229), |
| | | M.718 (217-231), M.720 (217-231), M.723 (214-228), M.725 (215-229) |
| LVSVEDIVLQHWATY | 4 | M.576 (57-71), M.595 (223-237), M.648 (223-237), M.662 (222-236), M.694 (226-240), M.701 (226-240), M.715 (221-235), |
| | | M.718 (223-237), M.720 (223-237), M.723 (220-234), M.725 (221-235) |
| KELMANLVKMOSALS | 4 | M.576 (90-104), M.595 (256-270), M.648 (256-270), M.662 (255-269), M.694 (259-273), M.701 (259-273), M.715 (254-268), |
| | | M.718 (256-270), M.720 (256-270), M.723 (253-267), M.725 (254-268) |
| LVKMQSALSDVNKLI | 4 | M.576 (96-110), M.595 (262-276), M.648 (262-276), M.662 (261-275), M.694 (265-279), M.701 (265-279), M.715 (260-274), |
| | | M.718 (262-276), M.720 (262-276), M.723 (259-273), M.725 (260-274) |
| HQGTRYLFGDGSRLV | 4 | M.576 (139-153), M.648 (305-319), M.662 (304-318), M.694 (308-322), M.701 (308-322), M.715 (303-317), M.718 (305-319), |
| | | M.720 (305-319), M.723 (302-316), M.725 (303-317) |
| SRLVFRLSGTGSVGA | 4 | M.576 (150-164), M.648 (316-330), M.662 (315-329), M.694 (319-333), M.701 (319-333), M.715 (314-328), M.718 (316-330), |
| | | M.720 (316-330), M.723 (313-327), M.725 (314-328) |
| GATTRIYTEQYENDS | 4 | M.576 (163-177), M.648 (329-343), M.662 (328-342), M.694 (332-346), M.701 (332-346), M.715 (327-341), M.718 (329-343), |
| | | M.720 (329-343), M.723 (326-340), M.725 (327-341) |
| DALSPLVDVALKLSK | 4 | M.576 (186-200), M.662 (351-365), M.694 (355-369), M.701 (355-369), M.715 (350-364), M.718 (352-366), M.720 (352-366), |
| | | M.723 (349-363), M.725 (350-364) |
| QDFKKVNETYAKYFP | 36 | M.202 (0-14), M.301 (0-14) |
| NEIYAKYFPSPAPAR | 36 | M.202 (6-20), M.301 (6-20) |
| YFPSPAPARSTYQVA | 36 | M.202 (12-26), M.301 (12-26) |
| ARSTYQVAALPLDAR | 36 | M.202 (19-33), M.301 (19-33) |
| LPLDARIEIECIAAL | 36 | M.202 (28-42), M.301 (28-42) |
| PPPGOHIAMAASSRR | 20 | M.675 (19-33), M.678 (24-38) |
| ASQLLGSAASRFLHB | 20 | M.675 (34-48), M.678 (39-53) |
| SRFLHSRGYAAAAAA | 20 | M.675 (43-57), M.678 (48-62) |
| RGYAAAAAAPSFAVF | 20 | M.675 (49-63), M.678 (54-68) |
| LGLPVFNSVAEAKAE | 20 | M.583 (15-29), M.641 (53-67), M.649 (22-36), M.675 (108-122), M.678 (113-127), |
| TKANAZVLYVPPPFA | 20 | M.583 (30-44), M.641 (68-82), M.649 (37-51), M.675 (123-137), M.678 (128-142), |
| VIYVPPPFAAAAIME | 20 | M.583 (36-50), M.641 (74-88), M.649 (43-57), M.675 (129-143), M.678 (134-148), |
| PFAAAAIMEALEAEL | 20 | M.583 (42-56), M.641 (80-94), M.649 (49-63), M.675 (135-149), M.678 (140-154), |
| QHDMVKVKAALNRQS | 20 | M.583 (68-82), M.641 (106-120), M.649 (75-89), M.675 (161-175), M.678 (166-180), |
| ILIYEAVFQTTAVEL | 20 | M.499 (18-32), M.583 (123-137), M.641 (161-175), M.649 (130-144), M.675 (216-290), M.678 (221-235), |
| DKPVVAFIAGLTAPP | 20 | M.499 (90-104), M.583 (195-209), M.641 (233-247), M.649 (202-216), M.675 (228-302), M.678 (293-307), |
| KIKALREAGVTVVES | 20 | M.499 (125-139), M.583 (230-244), M.641 (266-282), M.649 (237-251), M.675 (323-337), M.678 (328-342), |
| GSTMFEIFKQRGMVE | 20 | M.499 (144-158), M.583 (249-263), M.641 (287-301), M.649 (256-270), M.675 (342-356), M.678 (347-361), |
| IVSDEYLAAVAKARR | 5 | M.423 (4-18), M.625 (15-29), M.631 (9-23), M.654 (5-19), M.655 (26-40), M.682 (4-18) |
| LDIAVRLLEPIKEQV | 5 | M.393 (58-72), M.421 (71-85), M.618 (64-78), M.625 (82-96), M.631 (76-90), M.654 (72-86), M.655 (93-107), M.669 (58-72), |
| | | M.682 (71-85) |
| IKEQVPILSYADFYQ | 5 | M.393 (68-82), M.421 (81-95), M.618 (74-88), M.625 (92-106), M.631 (86-100), M.654 (82-96), M.655 (103-117), M.669 |
| | | (68-82), M.682 (81-95) |
| ILSYADFYQLAGVVA | 5 | M.393 (74-88), M.421 (87-101), M.618 (80-94), M.625 (98-112), M.631 (92-106), M.654 (88-102), M.655 (109-123), M.669 |
| | | (74-88), M.682 (87-101) |
| FYOLAGVVAVEITGG | 5 | M.393 (80-94), M.421 (93-107), M.618 (86-100), M.625 (104-118), M.631 (98-112), M.654 (94-108), M.655 (115-129), |
| | | M.669 (80-94), M.682 (93-107) |
| DHLRQVFTAQMGLSD | 5 | M.393 (123-137), M.421 (136-150), M.524 (30-44), M.618 (129-143), M.625 (147-161), M.631 (141-155), M.654 (137-151), |
| | | M.655 (158-172), M.669 (123-137), M.682 (136-150) |
| NPLIFDNSYFTELLT | 5 | M.524 (73-87), M.618 (172-186), M.625 (190-204), M.631 (184-198), M.654 (180-194), M.655 (201-215), M.669 (166-180), |
| | | M.682 (179-193) |
| EDAFFADYAEARLKL | 5 | M.524 (119-133), M.618 (218-232), M.625 (236-250), M.631 (230-244), M.654 (226-240), M.655 (247-261), M.669 (212-226), |
| | | M.682 (225-239) |
| EDSHFVVELIYNYGV | 60 | M.509 (25-39) |
| RAIKFYEKAFGMELL | 60 | M.302 (38-52), M.484 (70-84), M.493 (35-49), M.497 (35-49), M.509 (121-135), M.515 (52-66), M.521 (35-49), M.533 (70-84) |
| NPQYKYTTAMMGYGP | 60 | M.302 (57-71), M.484 (89-103), M.493 (54-68), M.497 (54-68), M.509 (140-154), M.515 (71-85), M.521 (54-68), |
| | | M.533 (89-103) |
| KNAVLELTYNYGVKE | 60 | M.302 (74-88), M.484 (106-120), M.493 (71-85), M.497 (71-85), M.509 (157-171), M.515 (88-102), M.521 (71-85), M.533 |
| | | (106-120) |
| DGWKSVFVDNLDFLK | 60 | M.484 (172-185), M.493 (137-151), M.497 (137-151), M.515 (154-168), M.521 (137-151), M.533 (172-186) |
| EEAASTLPGLSSSTL | 37 | M.492 (4-18) |
| TLLFPHTQTSLPSVR | 6 | M.639 (0-14) |
| VRTRKHLAATMADEK | 6 | M.639 (13-27) |
| DNEKSGFTSLVSRYL | 6 | M.570 (7-21), M.639 (43-67) |
| FISLVSRYLSGEEEH | 6 | M.570 (13-27) |
| EATKALLNKLAVLKL | 6 | M.555 (11-25), M.639 (91-105) |
| IEVRNGFTFLDLIVL | 6 | M.546 (34-48), M.555 (42-56), M.570 (86-100), M.639 (122-136) |
| FLDLIVLQIESLNKK | 6 | M.546 (42-56), M.555 (50-64), M.570 (94-108), M.639 (130-144) |
| LNKKYGSNVPLLLMN | 6 | M.546 (53-67), M.555 (61-75), M.570 (105-119), M.639 (141-155) |
| NVPLLLMNSFNIHED | 6 | M.546 (60-74), M.555 (68-82), M.570 (112-126), M.639 (148-162) |
| LKIVEKYANSSIDIH | 6 | M.546 (76-90), M.555 (94-98), M.570 (128-142), M.639 (164-178) |
| SIDIHTFNQSQYPRV | 6 | M.546 (86-100), M.555 (94-105), M.570 (138-152), M.639 (174-188) |
| GKLDLLLSQGKEYVF | 6 | M.546 (135-149), M.555 (143-157), M.570 (187-201), M.639 (223-237) |
| GKEYVFIANSDNLGA | 6 | M.546 (144-158), M.555 (152-166), M.570 (196-210), M.639 (232-246) |
| SDNLGALVDMKILNH | 6 | M.450 (4-18), M.546 (153-167), M.555 (161-175), M.570 (205-219), M.639 (241-255) |
| IVDMKTLNHLIRKON | 6 | M.450 (10-24), M.546 (159-173), M.555 (167-181), M.570 (211-225), M.639 (247-261) |
| ISYEGRVQLLEIAQV | 6 | M.450 (44-58), M.546 (193-207), M.555 (201-215), M.570 (245-259), M.639 (281-295) |
| VQLLEIAQVPDAHVD | 6 | M.450 (50-64), M.546 (199-213), M.555 (207-271), M.570 (251-265), M.639 (287-301) |
| FKSIEKFKIFNINNL | 6 | M.450 (66-80), M.546 (215-229), M.555 (223-237), M.639 (303-317) |
| FKIFNTNNLWVNLKA | 6 | M.450 (72-86), M.546 (221-235), M.555 (229-243), M.639 (309-323) |
| NNLWVNLKAIKRLVE | 6 | M.450 (78-92), M.546 (227-241), M.555 (235-249), M.639 (315-329) |
| IKRLVEADALKMEIL | 6 | M.450 (87-101), M.546 (236-250), M.555 (244-258), M.639 (324-338) |
| VKVLQLETAAGAAIR | 6 | M.341 (4-18), M.342 (4-18), M.343 (4-18), M.450 (110-124) |
| AAIRFFDHAIGINVP | 6 | M.341 (15-29), M.342 (15-29), M.343 (15-29), M.450 (121-135) |
| GINVPRSRFLPVKAT | 6 | M.341 (25-39), M.342 (25-39), M.343 (25-39), M.450 (131-145) |
| RFLPVKATSDLQLVQ | 6 | M.341 (32-46), M.342 (32-46), M.343 (32-46), M.450 (138-152) |
| TSDLQLVQSDLYTLV | 6 | M.341 (39-53), M.342 (39-53), M.343 (39-53), M.450 (145-159) |
| VQSDLYTLVDGFVTR | 6 | M.341 (45-59), M.342 (45-59), M.343 (45-59), M.450 (151-165) |
| GPEFKKVDSFLGRFK | 6 | M.342 (74-88), M.343 (74-88) |
| GRFKSIPSIVELDSL | 6 | M.341 (85-99), M.342 (85-99), M.343 (85-99) |
| LQSKNCILYLCSIMI | 61 | M.478 (0-14) |
| ILYLCSINICNCKVS | 61 | M.478 (6-20) |
| IMICNCKVSKVLNTY | 61 | M.478 (12-26) |
| KVSKVINTYIFLLYL | 61 | M.478 (18-32) |
| GTIRNIINGTVFREP | 7 | M.658 (30-44) |
| VFNFIGAGGVALAMY | 7 | M.548 (7-21), M.560 (7-21), M.606 (17-31), M.628 (26-40) M.658 (100-114), M.695 (71-85) |
| IQGFAEASMAIAYEK | 7 | M.548 (27-41), M.560 (27-41), M.606 (37-51), M.628 (46-60) M.658 (120-134), M.695 (91-105) |
| ASMAIAYEKKWFLYL | 7 | M.548 (33-47), M.560 (33-47), M.606 (43-57), M.628 (52-66) M.658 (126-140), M.695 (97-111) |
| EKKWPLYLSIKNTIL | 7 | M.548 (40-54), M.560 (40-54), M.606 (50-64), M.628 (59-73) M.658 (133-147), M.695 (104-118) |
| GRKKDIFQAVYEADW | 7 | M.548 (59-73), M.560 (59-73), M.606 (69-83), M.628 (78-92) M.658 (152-166), M.695 (123-137) |
| WYEHRLIDDMVAYAL | 7 | M.248 (28-42), M.548 (83-97), M.560 (83-97), M.606 (93-107), M.628 (102-116) M.658 (176-190), M.695 (147-161) |
| VQSDFLAQGFGELGL | 7 | M.248 (59-73), M.548 (114-128), M.560 (114-128), M.606 (124-138), M.628 (133-147), M/658 (207-221), M.695 (178-192) |
| NSIASIFAWTRGLAH | 7 | M.269 (2-16), M.328 (2-16), M.466 (25-39), M.548 (166-180), M.560 (166-180), M.606 (176-190), M.628 (185-199), M.658 |
| | | (259-273), M.695 (230-244) |
| DNARLLDFTQKLZDA | 7 | M.269 (22-36), M.328 (22-36), M.466 (45-59), M.548 (186-200), M.560 (186-200), M.606 (196-210), M.628 (205-219) |
| | | M.658 (279-293), M.695 (250-264) |
| MTKDLALLVHGSSKV | 7 | M.269 (46-60), M.328 (46-60), M.466 (69-83), M.548 (210-224), M.560 (210-224), M.606 (220-234), M.628 (229-243) |
| | | M.658 (303-317), M.695 (274-288) |
| LNTEEFIDAVAAELQ | 7 | M.269 (66-80), M.328 (66-80), M.466 (89-103), M.548 (230-244), M.560 (230-244), M.606 (240-254), M.628 (249-263) |
| | | M.658 (323-337), M.695 (294-308) |
| NTRVLLLRRTSPFSA | 22 | M.615 (14-28) |
| DGYYTHGQCATIMFD | 22 | M.352 (75-89), M.514 (75-89), M.539 (95-109), M.569 (88-102), M.578 (87-101), M.580 (84-88), M.587 (96-110), M.588 |
| | | (97-111), M.594 (104-118), M.615 (123-137) |
| QCATIMFDVTSRLTY | 22 | M.352 (82-96), M.514 (82-96), M.539 (102-116), M.569 (95-109), M.578 (94-108), M.580 (91-105), M.587 (103-117), M.588 |
| | | (104-118), M.594 (111-125), M.615 (130-144) |
| RKKNLQYYETSAKSN | 22 | M.514 (138-152), M.539 (158-172), M.569 (151-165), M.578 (150-164), M.580 (147-161), M.587 (159-173), M.588 (160-174), |
| | | M.594 (167-181), M.615 (186-200) |
| SAKSNYNFEKPFLYL | 22 | M.514 (148-162), M.539 (168-182), M.569 (161-175), M.578 (160-174), M.580 (157-171), M.587 (169-183), M.588 (170-184), |
| | | M.594 (177-191), M.615 (196-210) |
| KPFLYLARKLAGDAN | 22 | M.514 (157-171), M.539 (177-191), M.569 (170-184), M.578 (169-183), M.580 (166-180), M.587 (178-192), M.588 (179-193), |
| | | M.594 (188-200), M.615 (205-219) |
| ANIHFVEALKPPE | 22 | M.514 (170-184), M.539 (190-204), M.569 (183-197), M.578 (182-196), M.580 (179-193), M.587 (191-205), M.588 (192-206), |
| | | M.594 (199-213), M.615 (218-232) |
| EAELAAAAAQPLPDD | 22 | M.514 (196-210), M.539 (216-230), M.569 (209-223), M.578 (208-222), M.580 (205-219), M.587 (217-231), M.588 (218-232), |
| | | M.594 (225-239), M.615 (244-258) |
| YQPAAMRRLSLILLA | 62 | M.528 (10-24), M.529 (10-24), M.535 (10-24), M.543 (10-24), M.590 (10-24), M.691 (10-24) |
| RRLSLILLAAAALLA | 62 | M.528 (16-30), M.529 (16-30), M.535 (16-30), M.543 (16-30), M.590 (16-30), M.691 (16-30) |
| LLAAAALLAAAVSAE | 62 | M.510 (7-21), M.528 (22-36), M.529 (22-36), M.535 (22-36), M.543 (22-36), M.590 (22-36), M.691 (22-36) |
| CPRAERIIAEVVQSK | 62 | M.510 (37-51), M.528 (52-66), M.529 (52-66), M.535 (52-66), M.543 (52-66), M.590 (52-66), M.691 (22-66) |
| AFDAVVRSKLALELE | 62 | M.119 (44-58), M.222 (54-68), M.373 (37-51), M.510 (103-117), M.528 (118-132), M.529 (118-132), M.535 (118-132), |
| | | M.543 (118-132), M.590 (118-132), M.691 (118-132) |
| CADILAIASRVLVIM | 62 | M.373 (58-72), M.510 (124-138), M.528 (139-153), M.529 (139-153), M.535 (139-153), M.543 (139-153), M.590 (139-153), |
| | | M.691 (139-153) |
| NFTVGRIIELFTAKG | 62 | M.373 (103-117), M.528 (184-198), M.529 (184-198), M.535 (184-198), M.543 (184-198), M.590 (184-198), M.691 (184-198) |
| IIELFTAKGFTVQEM | 62 | M.373 (109-123), M.528 (190-204), M.529 (190-204), M.535 (190-204), M.543 (190-204), M.590 (190-204), M.691 (190-204) |
| FIVQEMVALSGAHTL | 62 | M.373 (118-132), M.529 (199-213), M.535 (199-213), M.543 (199-213), M.590 (199-213), M.691 (199-213) |
| IAAFNDIMSSVLSS | 62 | M.590 (263-277) |
| FDNIYSVNIERGLGL | 62 | M.691 (275-289) |
| NIDFFEDFAKAIEEL | 62 | M.691 (313-327) |
| TDTIVYCAGRTFFFR | 9 | M.547 (38-52), M.562 (55-69), M.761 (42-56) |
| GRIFFFRRLDAPLDA | 9 | M.547 (46-60), M.562 (63-77), M.761 (50-64) |
| KSLVRAFMWDSGSTV | 9 | M.547 (134-148), M.562 (151-165), M.571 (151-165), M.741 (44-58), M.761 (138-152) |
| RVLSCDFXPTRPFRI | 9 | M.547 (157-171), M.562 (174-188), M.571 (174-188), M.734 (50-64), M.738 (49-63), M.741 (67-81), M.761 (161-175) |
| HTGSIYAVSWSADSK | 9 | M.547 (242-256), M.562 (259-273), M.571 (259-273), M.734 (135-149), M.738 (134-148), M.741 (152-166), M.761 (246-260) |
| AGHLKTVSSLITFPQ | 9 | M.597 (72-86), M.621 (45-59), M.651 (70-84), M.657 (81-95), M.677 (73-87), M.734 (224-238), M.738 (223-237), M.741 |
| | | (241-255), M.761 (335-349) |
| VSSLTYFPQSNPRTM | 9 | M.597 (78-92), M.621 (51-65), M.651 (76-90), M.657 (87-101), M.677 (79-93), M.734 (230-244), M.738 (229-243), M.741 |
| | | (247-261), M.761 (341-355) |
| SYDGVIIRWIGGVGY | 9 | M.597 (96-110), M.621 (69-83), M.651 (94-108), M.657 (105-119), M.677 (97-111), M.734 (248-262), M.738 (247-261), |
| | | M.741 (265-279), M.761 (359-373) |
| TQIKCFVAAEELIT | 9 | M.597 (120-134), M.621 (93-107), M.651 (118-132), M.657 (129-143), M.677 (121-135), M.734 (272-286), M.738 (271-285), |
| | | M.741 (289-303), M.761 (383-397) |
| NALNIAVCQPEFLI | 9 | M.597 (164-178), M.621 (137-151), M.651 (162-176), M.657 (173-187), M.677 (165-179), M.734 (316-330), M.738 (315-329), |
| | | M.741 (333-347), M.761 (427-441) |
| PEFALITIDSAIVLL | 9 | M.597 (173-187), M.621 (146-160), M.651 (171-185), M.657 (182-196), M.677 (174-188), M.734 (325-339), M.738 (324-338), |
| | | M.741 (342-356), M.761 (436-450) |
| TDSAIVLLRKSIVTS | 9 | M.597 (180-194), M.621 (153-167), M.651 (178-192), M.657 (189-203), M.677 (181-195), M.734 (332-346), M.738 (331-345), |
| | | M.741 (349-363), M.761 (443-457) |
| IKVSYTITSSAVSPD | 9 | M.597 (196-210), M.621 (169-183), M.651 (194-208), M.657 (205-219), M.677 (197-211), M.734 (348-362), M.738 (347-361), |
| | | M.741 (365-379), M.761 (459-473) |
| KLRIYSISGDILTEE | 9 | M.597 (222-236), M.621 (195-209), M.651 (220-234), M.657 (231-245), M.677 (223-237), M.734 (374-388), M.738 (373-387), |
| | | M.741 (391-261), M.761 (485-499) |
| IRYSPDVSMFASADA | 9 | M.597 (249-263), M.621 (222-236), M.651 (247-261), M.657 (258-272), M.677 (250-264), M.734 (401-415), M.738 (400-414), |
| | | M.741 (418-432), M.761 (512-526) |
| IKLKNMLEHTARINC | 9 | M.597 (277-291), M.621 (250-264), M.651 (275-289), M.657 (286-300), M.677 (278-292), M.734 (429-443), M.738 (428-442), |
| | | M.741 (446-460), M.761 (540-554) |
| STKIFLESSTMESRA | 38 | M.709 (2-16) |
| CAAVLAASAVVVLVV | 38 | M.668 (7-21), M.709 (52-66) |
| VVVLVVASGLAGSRV | 38 | M.668 (16-30) |
| LAGSRVVRVAVDVAT | 38 | M.668 (25-39) |
| GWYHLFYQYNPEGAV | 38 | M.584 (28-42), M.592 (28-42), M.599 (51-65), M.635 (73-87), M.647 (82-96), M.668 (113-127), M.686 (65-79), |
| | | M.709 (158-172), M.760 (24-38) |
| SRDLIHWRHLPLAMV | 38 | M.584 (53-67), M.592 (53-67), M.599 (76-90), M.635 (98-112), M.647 (107-121), M.668 (138-152), M.686 (90-104), |
| | | M.709 (183-197), M.760 (49-63) |
| LNMLYTGSTNASVQV | 38 | M.489 (7-21), M.584 (90-104), M.592 (90-104), M.599 (113-127), M.635 (135-149), M.647 (144-158), M.668 (175-189), |
| | | M.686 (127-141), M.709 (220-234), M.760 (86-100) |
| IANVYKIKDFVSYEL | 38 | M.417 (34-48), M.457 (2-16), M.486 (33-47), M.489 (88-102), M.495 (32-46), M.584 (171-185), M.592 (171-185), M.599 |
| | | (194-208), M.635 (216-230), M.647 (225-239) M.668 (256-270), M.686 (208-222), M.709 (301-315), M.729 (34-48), M.760 |
| | | (167-181) |
| TKDFVSYELIPGLLH | 38 | M.417 (40-54), M.457 (8-22), M.486 (39-53), M.489 (94-108), M.495 (38-52), M.584 (177-191), M.592 (177-191), M.599 |
| | | (200-214), M.635 (222-236), M.647 (231-245) M.668 (262-276), M.686 (214-228), M.709 (307-321), M.729 (40-54), M.760 |
| | | (173-187) |
| WGKFYASKTFYDPAK | 38 | M.417 (122-136), M.457 (90-104), M.486 (121-135), M.489 (176-190), M.495 (120-134), M.584 (259-273), M.592 (259-273), |
| | | M.599 (282-296), M.635 (304-318), M.647 (313-327) M.668 (344-358), M.686 (296-310), M.709 (389-403), M.729 |
| | | (122-136), M.760 (265-269) |
| KGWASLMSIPRTVDL | 38 | M.457 (125-139), M.486 (156-170), M.495 (155-169), M.686 (331-345), M.729 (157-171), M.760 (290-304) |
| LRRAICLDIEAAFHL | 38 | M.729 (212-226), M.760 (345-359) |
| EAAFRLDHAAVAALN | 38 | M.729 (221-235), M.760 (354-368) |
| ECIAVYFYYSRGLDG | 38 | M.729 (269-283), M.760 (402-435) |
| VKRVVGYTVPVLDGE | 38 | M.729 (303-317), M.760 (435-450) |
| EAFSVRVLVDRSIVE | 38 | M.729 (317-332), M.760 (450-464) |
| EAIYAAAGVYLFNNA | 38 | M.729 (349-363), M.760 (482-496) |
| VYLFNNAISGIVTVE | 38 | M.729 (357-371), M.760 (490-504) |
| TDIVEVVVSPPYVFL | 39 | M.415 (6-20), M.464 (41-55) M.467 (24-38), M.520 (40-54) |
| SPPYVFLPIVKDKLR | 39 | M.415 (14-28), M.464 (49-63) M.467 (32-46), M.520 (48-62) |
| GAFTGEVSAENLANL | 39 | M.415 (44-58), M.464 (79-93) M.467 (62-76), M.494 (33-47), M.520 (78-92) |
| VSAEMLANLGIFNVI | 39 | M.415 (50-64), M.464 (85-99) M.520 (84-98) |
| GESSEFVGDKVAYAL | 39 | M.410 (21-35) M.415 (75-89), M.464 (110-124) M.467 (93-107), M.494 (64-78), M.520 (109-123) |
| GDKVAYALACGLKVI | 39 | M.392 (2-16) M.410 (28-42), M.415 (82-96) M.458 (0-14), M.464 (117-131), M.467 (100-114), M.494 (71-85), M.520 (116-130) |
| STMTVVAEQTKAIAD | 39 | M.347 (23-37) M.374 (18-32), M.392 (30-44) M.410 (56-70), M.415 (110-124), M.458 (28-42), M.464 (145-159), M.467 |
| | | (128-142), M.494 (99-113), M.520 (144-158) |
| DWTNVVIAYEEVWAI | 39 | M.347 (41-55) M.374 (36-50), M.392 (48-62) M.410 (74-88), M.415 (128-142), M.458 (46-60), M.464 (163-177), M.467 |
| | | (146-160), M.494 (117-131), M.520 (162-176) |
| IAYEPVWAIGTGKVA | 39 | M.347 (47-61) M.374 (42-56), M.392 (54-68) M.410 (80-94), M.415 (134-148), M.458 (52-66), M.464 (169-183), M.467 |
| | | (152-166), M.494 (123-137), M.520 (168-182) |
| LRPEFIDIINAATVK | 39 | M.374 (116-130), M.458 (126-140), M.494 (197-211) |
| RTSSWGSGASLKIDR | 23 | M.419 (0-14), M.443 (0-14) |
| SLKIDRRELVIRIY | 23 | M.419 (9-23), M.443 (9-23) |
| RFLHAAVAMATKRSV | 24 | M.540 (10-24), M.640 (8-22), M.642 (8-22), M.645 (18-32) |
| EGKKVFLRADLNVPL | 24 | M.540 (33-47) M.622 (16-30), M.626 (16-30) M.627 (21-35), M.640 (31-45), M.642 (31-45), M.645 (41-55), M.646 (32-46), |
| | | M.650 (34-48), M.652 (34-48) |
| TRIRASIPTIKFLLE | 24 | M.540 (57-71) M.581 (10-24), M.622 (40-54), M.626 (40-54) M.627 (45-59), M.640 (55-69), M.642 (55-69), M.645 (65-79), |
| | | M.646 (56-70), M.650 (58-72), M.652 (58-72) |
| IIFFLLEKGAKVILA | 24 | M.540 (65-79) M.581 (18-32), M.622 (48-62), M.626 (48-62) M.627 (53-67), M.640 (63-77), M.642 (63-77), M.645 (73-87), |
| | | M.646 (64-78), M.650 (66-80), M.652 (66-80) |
| EKGAKVILASHLGRP | 24 | M.540 (71-85) M.581 (24-38), M.622 (54-68), M.626 (54-68) M.627 (59-73), M.640 (69-83), M.642 (69-83), M.645 (79-93), |
| | | M.646 (70-84), M.650 (72-86), M.652 (72-86) |
| VPRLSELLGVEVVMA | 24 | M.540 (98-112) M.559 (17-31), M.565 (22-36), M.567 (22-36) M.581 (51-65), M.622 (81-95), M.626 (81-95), M.627 (86-100), |
| | | M.640 (96-110), M.642 (96-110), M.645 (106-120), M.646 (97-111), M.650 (99-113), M.652 (99-113) |
| GGVLLLENVRFYKEE | 24 | M.540 (130-144) M.559 (49-63), M.565 (54-68), M.567 (54-68) M.581 (83-97), M.622 (113-127), M.626 (113-127), M.627 |
| | | (118-132), M.640 (128-142), M.642 (128-142), M.645 (138-152), M.646 (129-143), M.650 (131-145), M.652 (131-145) |
| PEFAKKLASVADLYV | 24 | M.540 (149-163) M.559 (68-82), M.565 (73-87), M.567 (73-87) M.581 (102-116), M.622 (132-146), M.626 (132-146), |
| | | M.627 (137-151), M.640 (147-161), M.642 (147-161), M.645 (157-171), M.646 (148-162), M.650 (150-164), M.652 (150-164) |
| KFLRPSVAGFLMQKE | 24 | M.540 (182-196) M.559 (101-115), M.565 (106-120), M.567 (106-120) M.581 (135-149), M.622 (165-179), M.626 (165-179), |
| | | M.627 (170-184), M.640 (180-194), M.642 (180-194), M.645 (190-204), M.646 (181-195), M.650 (183-197), M.652 |
| | | (183-197) |
| VGFLMOKELDYLVG | 24 | M.540 (188-202) M.559 (107-121), M.565 (112-126), M.567 (112-126) M.581 (141-155), M.622 (171-185), M.626 (171-185), |
| | | M.627 (176-190), M.640 (186-200), M.642 (186-200), M.645 (196-210), M.646 (187-201), M.650 (189-203), M.652 |
| | | (189-203) |
| KELDYLGAVANPKK | 24 | M.540 (195-209) M.559 (114-128), M.565 (119-133), M.567 (119-133) M.581 (148-162), M.622 (178-192), M.626 (178-192), |
| | | M.627 (183-197), M.640 (193-207), M.642 (193-207), M.645 (203-217), M.646 (194-208), M.650 (196-210), M.652 |
| | | (196-210) |
| KIGVIESLLAKVDIL | 24 | M.540 (223-237) M.559 (142-156), M.565 (147-161), M.567 (147-161) M.581 (176-190), M.622 (206-220), M.626 (206-220), |
| | | M.627 (211-225), M.640 (221-235), M.642 (221-235), M.645 (231-245), M.646 (222-236), M.650 (224-238), M.652 |
| | | (224-238) |
| GMIFTFYKAQGKAVG | 24 | M.559 (161-175) M.565 (166-180), M.567 (166-180), M.581 (195-209), M.622 (225-239), M.626 (225-239), M.627 (230-244), |
| | | M.640 (240-254), M.642 (240-254), M.645 (250-264), M.646 (241-255), M.650 (243-257), M.652 (243-257) |
| EEDKLELAISLIEIA | 24 | M.559 (180-194), M.565 (185-199), M.567 (185-199), M.581 (214-228), M.622 (244-258), M.626 (244-258), M.627 (249-263), |
| | | M.640 (259-273), M.642 (259-273), M.645 (269-283), M.646 (260-274), M.650 (262-276), M.652 (262-276) |
| GVSLLLPIDVVVADK | 24 | M.559 (198-212), M.565 (203-217), M.567 (203-217), M.581 (232-246), M.622 (262-276), M.626 (262-276), M.627 (267-281), |
| | | M.640 (277-291), M.642 (277-291), M.645 (287-301), M.646 (278-292), M.650 (280-294), M.652 (280-294) |
| SAPALRILRSFPSRS | 25 | M.609 (1-15) |
| VELVANDPFITIDY | 26 | M.255 (1-15), M.471 (1-15), M.496 (1-15), M.575 (1-15) |
| DYMTYMFRYDIVHGQ | 26 | M.255 (14-28), M.471 (14-28), M.496 (14-28), M.575 (14-28), M.586 (8-22) |
| GGAKKVIISAPSKDA | 26 | M.471 (89-103), M.496 (89-103), M.575 (89-103) M.586 (83-97) |
| TISDITIVSNASCIT | 26 | M.471 (115-129), M.496 (115-129), M.575 (115-129) M.586 (109-123) |
| KVINDRFGIVEGLMT | 26 | M.471 (137-151), M.496 (137-151), M.575 (137-151) M.586 (131-145) |
| FGIVEGLMTTBAMT | 26 | M.471 (143-157), M.496 (143-157), M.575 (143-157) M.586 (137-151) |
| GGRAASFNIIPSSTG | 26 | M.367 (15-29), M.471 (173-187), M.496 (173-187), M.575 (173-187) M.586 (167-181) |
| LIVRLENAAIYEQIK | 26 | M.367 (62-76), M.575 (220-234), M.586 (214-228) |
| ALNDNFVKLVSWYDN | 26 | M.182 (43-57), M.189 (38-52), M.283 (50-64), M.297 (43-57) M.586 (271-285) |
| VWQHDRVEIIANDQG | 40 | M.118 (1-15) |
| VEIIANDQGNRTTPS | 40 | M.118 (7-21) |
| TIPSYVAFIDSERLI | 40 | M.118 (18-32) |
| KNQVAMNPINTVFGE | 40 | M.118 (37-51) |
| NPINTVFGEHLSTCT | 40 | M.118 (43-57) |
| SSTRGWCSRRRAGRG | 41 | M.346 (0-14) |
| EEKGFAAEEISSMVL | 42 | M.318 (16-30) |
| SSMVLIKMREIAEAF | 42 | M.318 (26-40) |
| SIKNAVVTVPAYEND | 42 | M.318 (44-58) |
| GVIAGLNVLRIINEP | 42 | M.318 (68-82) |
| VLRIINEPTAAAIAY | 42 | M.318 (75-89) |
| GRYFSKDAVQIITKM | 10 | M.177 (9-23) |
| DAYQIITRNAAANGV | 10 | M.177 (15-29) |
| GVRRVWVGQDSLLST | 10 | M.177 (28-42) |
| SLLSTPAVSAIIRER | 10 | M.177 (38-52) |
| AVSAIIRERIAADGS | 10 | M.177 (44-58) |
| YPSMLLILLLLBGAN | 63 | M.408 (4-18), M.432 (4-18), M.477 (4-18) |
| ILLLLHGANAALDEP | 63 | M.361 (5-19), M.408 (10-24), M.432 (10-24) M.477 (10-24) |
| ESSLYAYOFAMSNGL | 63 | M.361 (45-59), M.408 (50-64), M.432 (50-64) M.477 (50-64) |
| SGLRLDRSTLIAEVF | 63 | M.361 (80-94), M.408 (85-99), M.432 (85-99) M.477 (85-99) |
| IRGWFAVDFTAAELV | 63 | M.361 (108-122), M.408 (113-127), M.432 (113-127) M.477 (113-127) |
| IGKRFASINVENVED | 27 | M.469 (45-59) |
| ALRELLFTIFGALQH | 27 | M.469 (63-77) |
| LQHISGVILFEETLY | 27 | M.469 (75-89) |
| TEAGARFARWRAVLK | 27 | M.104 (18-32) M.469 (143-157) |
| GLARYAIICQENGLV | 27 | M.206 (26-40) M.469 (174-188), M.472 (10-24) |
| RCAYVTEVVLAACYK | 27 | M.206 (57-71) M.472 (41-55) |
| NDQHVLLEGSLLKPN | 27 | M.472 (58-72) |
| WFLSFSFGRALQQST | 27 | M.294 (68-80) M.314 (61-75), M.472 (135-149) |
| SVGFVETLENDLAQL | 11 | M.372 (57-71), M.466 (7-21), M.513 (56-70) M.579 (35-49), M.593 (50-64) |
| LGEAPYRFKSALEAV | 11 | M.372 (110-124), M.395 (25-39), M.446 (60-74) M.506 (30-44), M.513 (109-123), M.579 (88-102), M.593 (103-117) |
| KFKSALEAVKTLRAE | 11 | M.372 (116-130), M.395 (31-45), M.446 (66-80) M.513 (115-129), M.579 (94-108), M.593 (109-123) |
| QYLOAFVIVDESGKS | 11 | M.395 (51-65), M.446 (86-100), M.506 (56-70) M.513 (135-149), M.579 (114-128), M.593 (129-143) |
| VVTIFNFRADRMVMLA | 11 | M.381 (2-16), M.388 (2-16), M.391 (2-16) M.395 (75-89), M.446 (110-124), M.506 (80-94) M.513 (159-173), M.579 (138-152), |
| | | M.593 (153-167) |
| ADEMVMLAFALEFAD | 11 | M.381 (9-23), M.388 (9-23), M.391 (9-23) M.395 (82-96), M.446 (117-131), M.506 (87-101) M.513 (166-180), M.579 (145-159), |
| | | M.593 (160-174) |
| FDKFDRVRVPKIKYA | 11 | M.381 (24-38), M.391 (24-38) M.395 (97-111), M.446 (132-146), M.506 (102-116) M.513 (181-195), M.579 (160-174), |
| | | M.593 (175-189) |
| PKIKYAGMIQYDEL | 11 | M.381 (33-47), M.388 (33-47), M.391 (33-47) M.395 (106-120), M.446 (141-155), M.506 (111-125) M.513 (190-204), |
| | | M.579 (169-183), M.593 (184-198) |
| LKLPNKFLVSPPLIE | 11 | M.381 (47-61), M.388 (47-61), M.391 (47-61) M.395 (120-134), M.446 (155-169), M.506 (125-139) M.513 (204-218), |
| | | M.579 (183-197), M.593 (198-212) |
| GILLDFVNYEPLTYN | 43 | M.523 (0-14) |
| ETMQRLVADRLPNFT | 43 | M.479 (11-25), M.519 (40-54), M.523 (43-57) M.600 (40-54) |
| GYSKWLYVVPWGEYK | 43 | M.371 (12-26), M.380 (12-26), M.438 (43-57) M.461 (62-76), M.479 (81-95), M.480 (12-26) M.482 (12-26), M.519 (110-124), |
| | | M.523 (113-127), M.556 (62-76) M.600 (110-124) |
| YVVPWGFYKAVMHVK | 43 | M.371 (18-32), M.380 (18-32), M.438 (49-63) M.461 (68-82), M.479 (87-101), M.480 (18-26) M.482 (18-32), M.519 (116-130), |
| | | M.523 (119-133), M.556 (68-82) M.600 (116-130) |
| KFRIDYFDQYLRELK | 43 | M.108 (6-20), M.254 (5-19), M.260 (9-19) M.253 (6-20), M.371 (62-76), M.380 (62-76) M.438 (93-107), M.461 (112-126), |
| | | M.479 (131-145), M.480 (62-76) M.482 (62-76), M.519 (160-174), M.523 (163-177), M.556 (112-126) M.600 (160-174) |
| ARVTGYFAWSLLDNF | 43 | M.108 (27-41), M.254 (26-40), M.260 (26-40) M.261 (27-41), M.371 (83-97), M.380 (83-97) M.438 (114-128), M.461 (113-147), |
| | | M.479 (152-166), M.480 (83-97) M.482 (83-97), M.519 (181-195), M.523 (184-198), M.556 (133-147) M.600 (181-195) |
| FAWSLLDNFENAMGF | 43 | M.108 (33-47), M.254 (32-46), M.260 (32-46) M.261 (33-47), M.371 (89-103), M.380 (89-103) M.438 (120-134), |
| | | M.461 (139-153), M.479 (158-172), M.480 (89-103) M.482 (89-103), M.519 (187-201), M.523 (190-204), |
| | | M.556 (139-153) M.600 (187-201) |
| EIPTISYSDLYQLAG | 64 | M.568 (15-29) M.589 (16-30) |
| YSDLYQLAGVVAVEV | 64 | M.568 (21-35) M.589 (22-36) |
| DHLRQVFGKQMGLSD | 64 | M.412 (5-19) M.516 (21-35) M.522 (5-19) M.568 (67-81), M.589 (68-82) |
| NNPLKFDNTYFIELL | 64 | M.412 (47-61), M.462 (20-34), M.516 (63-77), M.522 (47-61), M.568 (109-123), M.589 (110-124) |
| KAFFEDYKEAHLRLS | 64 | M.412 (95-109), M.462 (68-82), M.516 (111-125), M.522 (95-109), M.568 (157-171), M.589 (158-172) |
| YKLLCSSFPVITYHQ | 12 | M.525 (4-18), M.656 (4-18) |
| FPVITYHQGRNGNLS | 12 | M.525 (11-25), M.656 (11-25) |
| RNGNLSALACPLNQK | 12 | M.525 (20-34), M.619 (20-34), M.656 (20-34) |
| IPPAPHLKRWNRVVD | 28 | M.420 (1-15), M.444 (1-15) |
| LKRWNKVVDTNLEEP | 28 | M.420 (7-21), M.444 (7-21) |
| VVDINLESPNDIVPE | 28 | M.420 (13-27), M.444 (13-27) |
| GAPFIGSGYRIAPYS | 28 | M.420 (28-42), M.444 (28-42) |
| GYRIAPYSSILLKAT | 28 | M.420 (35-49), M.444 (35-49) |
| ECILSGLLSVDGLKV | 13 | M.620 (15-29), M.630 (16-30), M.698 (16-30), M.599 (16-30) |
| LLSVDGLKVLHMDRN | 13 | M.620 (21-35), M.630 (22-36), M.698 (22-36), M.699 (22-36), M.708 (0-14) |
| VPKFMMANGALVRVL | 13 | M.620 (75-89), M.630 (76-90), M.698 (76-90), M.699 (76-90), M.708 (54-68) |
| VRVLIRTSVTKYLNF | 13 | M.620 (86-100), M.630 (87-101), M.698 (87-101), M.699 (87-101), M.708 (65-79) |
| TKYLNFKAVDGSFVY | 13 | M.620 (95-109), M.630 (96-100), M.698 (96-100), M.699 (96-100), M.708 (74-88) |
| IDVEALKSNLMGLFE | 13 | M.620 (120-134), M.630 (121-135), M.698 (121-135), M.699 (121-135), M.708 (99-113) |
| EKRRARRFFIVVQDY | 13 | M.620 (134-148), M.630 (135-149), M.698 (134-149), M.699 (134-149), M.708 (113-127) |
| KFFIYVQDYEEEDPK | 13 | M.620 (140-154), M.630 (141-155), M.698 (141-155), M.699 (141-155), M.708 119-133) |
| TVDFIGHALAHRDD | 13 | M.439 (14-28), M.620 (179-193), M.630 (180-194), M.698 (180-194), M.699 (180-194), M.708 (158-172) |
| VKRMKLYAESLARFQ | 13 | M.439 (39.53), M.620 (204-218), M.630 (205-219), M.698 (205-219), M.699 (205-219), M.708 (183-197) |
| GELPQAFARLSAVYG | 13 | M.439 (66.80), M.620 (231-245), M.630 (232-245), M.598 (232-246), M.699 (232-246), M.708 (210-224) |
| FARLSAVYGGTYMLN | 13 | M.439 (72-86), M.620 (237-251), M.630 (238-252), M.698 (238-252), M.699 (238-252), M.708 (216-230) |
| KGNFIAFVSIEAEID | 13 | M.698 (347-361), M.699 (347-361), M.708 (325-339) |
| ETTVKVLALYSKIT | 13 | M.708 (390-404) |
| LDLSVDLNAASAGES | 13 | M.708 (408-422) |
| FKDDPYIYAFDSLKY | 44 | M.400 (65-79), M.401 (20-34), M.409 (6-20), M.435 (6-20), M.470 (59-73), M.474 (65-79), M.490 (65-79), M.491 (65-79), |
| | | M.537 (6.20), M.553 (6.20) |
| AFDSLKYIGIELWQV | 44 | M.400 (73-87), M.401 (28-42), M.409 (14-28), M.435 (14-28), M.470 (57-81), M.474 (73-87), M.490 (79-87), M.491 (73-87), |
| | | M.537 (14-28), M.553 (14-28) |
| IELWQVKSGTLFDNI | 44 | M.400 (82.96), M.401 (37-81), M.409 (23-37), M.435 (23-37), M.470 (76-90), M.474 (82.96), M.490 (82.96), M.491 (82.96) |
| | | M.537 (23-37), M.553 (23-37) |
| GTLFDNILITDDAAL | 44 | M.400 (90-104), M.401 (45-59), M.409 (31-45), M.435 (31-45), M.470 (84-98), M.474 (90-104), M.490 (90-104), |
| | | M.491 (90-104), M.537 (31-45), M.553 (31-45) |
| ILITDDAALAKTPAE | 44 | M.400 (96-100), M.401 (51-65), M.409 (37-51), M.435 (37-51), M.470 (90-104), M.474 (96-110), M.490 (96-110), M.491 |
| | | (96-110), M.537 (37-51), M.553 (37-51) |
| FPPPRCCQDLVVIPI | 45 | M.402 (4-38), M.538 (4-18), M.594 (4-18) |
| RGLLRRARGGPHHRR | 46 | M.234 (2-16), M.237 (2-16), M.264 (2-16) |
| RGAHRRVPLRPLRHR | 46 | M.234 (18-32), M.237 (18-32), M.264 (18-32) |
| EGRRAKLRSAGEVEI | 46 | M.234 (39-53), M.237 (39-53), M.264 (39-53) |
| GEVEIQERVKCKYF | 46 | M.234 (49-63), M.237 (49-63), M.264 (49-63) |
| TKVTFHVVGVGPLLH | 46 | M.237 (66-80) |
| EDVAVSLAKYTAELS | 47 | M.549 (14-28), M.550 (14-28), M.551 (14-28), M.557 (14-28), M.563 (24-38), M.566 (25-39), M.573 (14-28) |
| GKFAAERGAFTVVLS | 47 | M.463 (36-50), M.549 (29-43), M.550 (29-43), M.551 (29-43), M.557 (29-43), M.558 (35-49), M.563 (39-53), M.566 (40-54), |
| | | M.573 (29-43) |
| AFIVVLSGGTLIDTL | 47 | M.463 (44-58), M.551 (37-51), M.557 (37-51), M.558 (43-57), M.566 (48-62), M.573 (37-51) |
| DSNYKLAVDGLLSKV | 47 | M.463 (91-105), M.532 (40-54), M.549 (84-98), M.550 (84-98), M.551 (84-98), M.557 (84-98), M.558 (90-104), |
| | | M.563 (94-108), M.566 (95-109), M.573 (84-98) |
| IVLKQLVKSGVLAMS | 47 | M.463 (130-144), M.550 (123-137), M.551 (123-137), M.558 (129-143), M.563 (133-147), M.566 (134-148) |
| KSGVLAMSTATGFPR | 47 | M.463 (137-151), M.550 (130-144), M.551 (130-144), M.558 (136-150), M.563 (140-154), M.566 (141-155) |
| PPPQRTIFIFPVIKS | 47 | M.532 (140-154), M.549 (184-198), M.550 (184-198), M.551 (184-198), M.557 (184-198), M.558 (190-204), M.563 (194-208), |
| | | M.565 (195-209), M.573 (184-198) |
| IFTFPVIKSSAYVAM | 47 | M.532 (146-160), M.549 (190-204), M.550 (190-204), M.551 (190-204), M.557 (190-204), M.558 (196-210), M.563 (200-214), |
| | | M.566 (201-215), M.573 (190-204) |
| KTLPLLPTEMAILQP | 47 | M.532 (179-193), M.549 (223-237), M.550 (223-237), M.551 (223-237), M.557 (223-237), M.558 (229-243), M.563 (233-247), |
| | | M.566 (234-248), M.573 (223-237) |
| NKLIGARSFFESAKW | 48 | M.247 (1-15), M.517 (0-14) |
| RAHIAFYQVCFEQKG | 48 | M.247 (64-78), M.517 (63-77), M.684 (0-14), M.739 (0-14) |
| AALNGVFVSTAAGNI | 48 | M.517 (122-136), M.684 (5-73), M.730 (45-59), M.732 (57-71), M.736 (45-59), M.737 (45-59), M.739 (59-73) |
| APWLLTVQASTSDRR | 48 | M.517 (147-161), M.684 (84-98), M.730 (70-84), M.732 (82-96), M.736 (70-84), M.737 (70-84), M.739 (84-98) |
| STSDRRFAATVKLGS | 48 | M.517 (156-170), M.684 (93-107), M.711 (2-16), M.712 (4-18), M.730 (79-93), M.732 (91-105), M.736 (79-93), M.737 (79-93), |
| | | M.739 (93-107) |
| VLRAGAFGMIVVAPA | 48 | M.684 (170-184), M.711 (79-93), M.712 (81-95), M.732 (168-182), M.736 (156-170), M.739 (170-184) |
| FGMIVVAPAVFGPVI | 48 | M.637 (0-14), M.684 (176-190), M.711 (85-99), M.712 (87-101), M.730 (162-176), M.732 (174-188), M.736 (162-176), |
| | | M.737 (162-176), M.739 (176-190) |
| YAVGQKIKAYLEAES | 48 | M.637 (28-42), M.684 (204-238), M.711 (113-127), M.712 (115-129), M.730 (190-204), M.732 (202-216), M.736 (190-204), |
| | | M.737 (190-204), M.739 (204-218) |
| VPGVVDIVLQPKEVM | 48 | M.637 (94-108), M.712 (181-195), M.730 (256-270), M.732 (268-282), M.736 (256-270), M.737 (256-270) |
| CPHLAGIAALLRNAH | 48 | M.637 (121-135), M.684 (297-311), M.711(206-220), M.712 (208-222), M.730 (283-297), M.732 (295-309), M.736 (283-297), |
| | | M.737 (283-297), M.739 (297-311) |
| GLVYNLTAAEYIPYL | 48 | M.637 (188-202), M.684 (364-378), M.711 (273-287), M.712 (275-289), M.730 (350-364), M.732 (362-376), M.736 (350-364), |
| | | M.737 (350-364), M.739 (364-378) |
| KADSVVNASRAVINV | 48 | M.637 (246-260), M.711 (331-345), M.712 (333-347), M.730 (408-422), M.732 (420-434), M.736 (408-422), M.737 (408-422), |
| | | M.739 (422-436) |
| KLTFKALEEVLNYTV | 48 | M.637 (285-299), M.711 (370-384), M.712 (372-386), M.730 (447-461), M.732 (459-473), M.736 (447-461), M.737 (447-461), |
| | | M.739 (461-475) |
| EEVINYIVIVKTAAV | 48 | M.637 (292-306), M.711 (377-391), M.712 (379-393), M.730 (454-468), M.732 (456-480), M.736 (454-468), M.737 (454-468), |
| | | M.739 (468-482) |
| IEGQLKWVSSKHIVR | 48 | M.637 (311-325), M.711 (396-410), M.712 (398-412), M.736 (473-487), M.737 (473-487), M.739 (487-501) |
| WVSSWHIVRSPILIL | 48 | M.637 (317-331), M.711 (402-416), M.712 (404-418), M.736 (479-493), M.737 (479-493), M.739 (493-507) |
| SPRFFLAHSSHPST | 29 | M.707 (0-14), M.710 (1-15) |
| EKAFKYLLGGGVAA | 29 | M.702 (14-28), M.707 (24-38), M.710 (25-39), M.713 (19-33) |
| TEKGIELILSTEIVK | 29 | M.638 (70-84), M.673 (49-63), M.683 (63-77), M.687 (70-84), M.697 (70-84), M.700 (68-82), M.702 (94-108), |
| | | M.707 (104-118), M.710 (105-119), M.713 (99-113) |
| ASNILISAAGATFIY | 29 | M.638 (88-302), M.673 (67-81), M.683 (81-95), M.687 (88-102), M.697 (88-102), M.700 (86-100), M.702 (112-326), M.707 |
| | | (122-136), M.710 (123-137), M.713 (117-131) |
| FTYEILLIATGSSTI | 29 | M.638 (100-114), M.673 (79-93), M.683 (93-107), M.687 (100-114), M.697 (100-114), M.700 (98-112), M.702 (124-138), |
| | | M.707 (134-148), M.710 (135-149), M.713 (129-143) |
| GGGYIGLELSAALKL | 29 | M.638 (157-171), M.673 (136-150), M.683 (150-164), M.687 (157-171), M.697 (157-171), M.700 (155-169), M.702 (181-195), |
| | | M.707 (191-205), M.710 (192-206), M.713 (186-200) |
| LELSAALKLNNFDVT | 29 | M.638 (163-177), M.673 (142-156), M.683 (156-170), M.687 (163-177), M.697 (163-177), M.700 (161-175), M.702 (187-201), |
| | | M.707 (197-211), M.710 (198-212), M.713 (192-206) |
| LKLNNFDVTMVYFEP | 29 | M.638 (169-183), M.673 (148-162), M.683 (162-176), M.687 (169-183), M.697 (169-183), M.700 (167-181), M.702 (193-207), |
| | | M.707 (203-217), M.710 (204-218), M.713 (198-212) |
| MPRLFTAGIAHFYEG | 29 | M.638 (186-200), M.673 (165-179), M.683 (179-193), M.687 (186-200), M.697 (186-200), M.700 (184-198), M.702 (210-224), |
| | | M.707 (220-234), M.710 (221-235), M.713 (215-229) |
| HFYEGYYASKGINIV | 29 | M.638 (196-210), M.873 (175-189), M.687 (196-210), M.697 (196-210), M.700 (194-208), M.702 (220-234), M.707 (230-244), |
| | | M.710 (233-245), M.713 (225-239) |
| SKGINIVKGIVASGF | 29 | M.638 (204-218), M.673 (183-197), M.687 (204-218), M.697 (204-218), M.700 (202-216), M.702 (228-242), M.707 (238-252), |
| | | M.710 (239-253), M.713 (233-247) |
| KANIVIVGVGGRPHT | 29 | M.638 (238-252), M.673 (217-231), M.683 (231-245), M.687 (238-252), M.697 (238-252), M.700 (236-250), M.702 (262-276), |
| | | M.707 (272-286), M.710 (273-287), M.713 (267-281) |
| KTDTFFETSVAGVYA | 29 | M.638 (267-281), M.673 (246-260), M.683 (260-274), M.687 (267-281), M.697 (267-281), M.700 (265-279), M.702 (291-305), |
| | | M.707 (301-315), M.710 (302-316), M.713 (296-310) |
| VYAIGDVASFPMKLY | 29 | M.638 (279-293), M.673 (258-272), M.683 (272-286), M.687 (279-293), M.697 (279-293), M.700 (277-291), M.702 (303-317), |
| | | M.707 (313-327), M.710 (314-328), M.713 (308-322) |
| DYLPYFYSRSFDIAW | 29 | M.638 (329-343), M.673 (308-322), M.683 (322-336), M.687 (329-343), M.697 (329-343), M.700 (327-341), M.702 (353-367), |
| | | M.707 (363-377), M.710 (364-378), M.713 (358-372) |
| LLGYLLWVVAIHRPR | 14 | M.746 (0-34), M.758 (0.14), M.762 (0.14), M.764 (0.14) |
| WVVAIRRPRPVRCFS | 14 | M.746 (6-20), M.758 (6-20), M.762 (6-20), M.764 (6-20) |
| EQFVIPWSFSVASGH | 30 | M.608 (17-31), M.643 (19-33), M.663 (17-31), M.664 (17-31), M.666 (17-31), M.670 (17-31), M.731 (19-33), M.735 (19-33), |
| | | M.740 (14-28), M.748 (19-33), M.750 (19-33), M.752 (18-32), M.754 (18-32), M.756 (18-32) |
| RDAHYLRGLLPPAIV | 30 | M.608 (50-64), M.643 (52-66), M.663 (50-64), M.664 (50-64), M.666 (50-64), M.670 (50-64), M.731 (52-66), M.735 (52-66), |
| | | M.740 (47-61), M.748 (52-66), M.750 (52-66), M.752 (51-65), M.754 (51-65), M.756 (51-65) |
| MHNLRQYIVFLQRYI | 30 | M.608 (74-88), M.643 (76-90), M.663 (74-88), M.664 (74-88), M.666 (74.88), M.670 (74-88), M.731 (76-90), M.735 (76-90), |
| | | M.740 (71-85), M.748 (76-90), M.750 (76-90), M.752 (75-89), M.754 (75-89), M.756 (75-89) |
| VPLQRYIAMMDLQER | 30 | M.608 (82-96), M.643 (84-98), M.663 (82-96), M.664 (82-96), M.666 (82-96), M.670 (82-96), M.731 (84-98), M.735 (84-98), |
| | | M.740 (79-93), M.748 (84-98), M.750 (84-98), M.752 (83-97), M.754 (83-97), M.756 (83-97) |
| ERLFHKILLIDNVEHL | 30 | M.608 (98-112), M.643 (100-114), M.663 (98-112), M.664 (98-112), M.666 (98-112), M.670 (98-112), M.731 (100-114), |
| | | M.735 (100-114), M.740 (95-109), M.748 (100-114), M.750 (100-114), M.752 (99-113), M.754 (99-113), M.756 (99-113) |
| EELLPVVYIPVVGEA | 30 | M.608 (110-124), M.643 (112-126), M.663 (110-124), M.664 (110-124), M.666 (110-124), M.670 (110-124), M.731 (112-126), |
| | | M.735 (112-126), M.740 (107-121), M.748 (112-126), M.750 (112-126), M.752 (111-125), M.754 (111-125), M.756 |
| | | (111-125) |
| RSIQVIVVIDGERIL | 30 | M.608 (158-172), M.643 (160-174), M.663 (158-172), M.664 (158-172), M.666 (158-172), M.670 (158-172), M.731 (160-174), |
| | | M.735 (160-174), M.740 (155-169), M.748 (160-174), M.750 (160-174), M.752 (159-173), M.754 (159-173), M.756 |
| | | (159-173) |
| EEYHELLQEFMNAVK | 30 | M.608 (234-248), M.643 (236-250), M.663 (234-248), M.664 (234-248), M.666 (234-248), M.670 (234-248), M.731 (236-250), |
| | | M.735 (236-250), M.740 (231-245), M.748 (236-250), M.750 (236-250), M.752 (235-249), M.754 (235-249), M.756 |
| | | (235-249) |
| GERVLVQFEDFANHN | 30 | M.608 (252-266), M.643 (254-268), M.663 (252-266), M.664 (252-266), M.666 (252-266), M.670 (252-266), M.731 (254-268), |
| | | M.735 (254-268), M.740 (249-263), M.748 (254-268), M.750 (254-268), M.752 (253-267), M.754 (253-267), M.756 |
| | | (253-267) |
| FDLLAKYSKSHLVFN | 30 | M.608 (268-282), M.643 (270-284), M.663 (268-282), M.664 (268-282), M.666 (268-282), M.260 (268-282), M.731 (270-284), |
| | | M.735 (270-284), M.740 (265-279), M.748 (270-284), M.750 (270-284), M.752 (269-283), M.754 (269-283), M.756 |
| | | (269-283) |
| VFNDDIQGIASVVLA | 30 | M.608 (280-294), M.643 (282-296), M.663 (280-294), M.664 (280-294), M.666 (280-294), M.670 (280-294), M.731 (282-296), |
| | | M.735 (282-296), M.740 (277-291), M.748 (282-296), M.750 (282-296), M.752 (281-295), M.754 (281-295), M.756 |
| | | (281-295) |
| SVVLAGLLAALKVIG | 30 | M.643 (292-306), M.663 (290-304), M.664 (290-304), M.666 (290-304), M.670 (290-304), M.731 (292-306), M.735 (292-306), |
| | | M.740 (287-301), M.748 (292-306), M.750 (292-306), M.752 (291-305), M.754 (291-305), M.756 (291-305) |
| GLADQTYLFLGAGEA | 30 | M.643 (308-322), M.663 (306-320), M.664 (306-320), M.666 (306-320), M.670 (306-320), M.731 (308-322), M.735 (308-322), |
| | | M.740 (303-317), M.748 (308-322), M.750 (308-322), M.752 (307-323), M.754 (307-321), M.756 (307-321) |
| TGTAELTALEMSKHT | 30 | M.643 (324-338), M.663 (322-336), M.664 (322-336), M.666 (322-336), M.670 (322-336), M.731 (324-338), M.735 (324-338), |
| | | M.740 (319-333), M.748 (324-338), M.750 (324-338), M.752 (323-337), M.754 (323-337), M.756 (323-337) |
| CRKKTWLVDSKGLLV | 30 | M.731 (345-359), M.735 (345-359), M.740 (340-354), M.748 (345-359), M.750 (345-359), M.752 (344-358), M.754 (344-358), |
| | | M.755 (344-358) |
| HEPLTTLLEAVQSLK | 30 | M.731 (377-391), M.735 (377-391), M.740 (372-386), M.748 (377-391), M.750 (377-391), M.752 (376-390), M.754 (376-390), |
| | | M.756 (376-390) |
| LLEAVQSLKPTVLIG | 30 | M.731 (383-397), M.735 (383-397), M.740 (378-392), M.748 (383-397), M.750 (383-397), M.752 (382-396), M.754 (382-396), |
| | | M.756 (382-396) |
| NELPVIFSLSNPTSH | 30 | M.731 (417-431), M.735 (417-431), M.740 (412-426), M.748 (417-431), M.750 (417-431), M.752 (416-430), M.754 (416-430), |
| | | M.756 (416-430) |
| EEAYTWTKGTAVFAS | 30 | M.731 (437-451), M.735 (437-451), M.740 (432-446), M.748 (437-451), M.750 (437-451), M.752 (436-450), M.754 (438-450), |
| | | M.756 (436-450) |
| GFGLGVVISGAIRVH | 30 | M.735 (478-492), M.740 (473-487), M.748 (478-492), M.750 (478-492), M.752 (477-491), M.754 (477-491), M.756 (477-491) |
| VISGAIRVHDDMLLA | 30 | M.735 (484-498), M.740 (479-493), M.748 (484-498), M.750 (484-498), M.752 (483-497), M.754 (483-497), M.756 (483-497) |
| HDDMLLAASEALAEQ | 30 | M.735 (492-506), M.740 (487-501), M.748 (492-506), M.750 (492-506), M.752 (491-505), M.754 (491-505), M.756 (491-505) |
| FPPFTNIRKTSANTA | 30 | M.740 (513-527), M.748 (518-532), M.750 (518-532), M.752 (517-531), M.754 (517-531), M.756 (517-531) |
| IRKISANIAAKVAAK | 30 | M.748 (524-538), M.750 (524-538), M.752 (523-537), M.754 (523-537), M.754 (523-537) |
| PRVNFFKKYNLTCVF | 15 | M.716 (0-14), M.726 (0-14) |
| KRYNLTCVWSKKKK | 15 | M.726 (6-20) |
| TIVASGTENMKTFTR | 8 | M.763 (5-19), M.765 (2-16) |
| FSCDSATQVTYTVRG | 65 | M.171 (10-24), M.205 (6-20), M.256 (21-35), M.332 (2-16) |
| YQVTYTVRGSGRVQV | 65 | M.148 (4-38), M.171 (16-30), M.205 (32-25), M.255 (27-41), M.332 (8-22), M.64 (0-14) |
| IEGGSLFIVPRFHVV | 65 | M.148 (31-45), M.171 (43-57), M.205 (39-53), M.22 (19-33), M.256 (54-68), M.332 (35-49), M.4 (16-30), M.55 (23-37), |
| | | M.56 (16-30), M.64 (27-41) |
| GNEWFSTTTTPNFIF | 65 | M.332 (57-71), M.58 (38-52) |
| GKTSVWKATSPEVLE | 65 | M.332 (76-90) |
| ELRKTYNLLDAVSRH | 48 | M.43 (0-14), M.47 (0-14), M.61 (0-14) |
| QVYPRSWSAVMLTFD | 49 | M.32 (13-27), M.43 (17-31), M.47 (17-31), M.57 (6-20), M.61 (17-31) |
| AVMLTFDNAGMWNVR | 49 | M.13 (5-19), M.32 (21-35), M.43 (25-39), M.47 (25-39), M.57 (14-28), M.61 (25-39) |
| NVWERHYLAGEMTLM | 49 | M.32 (37-51), M.47 (41-55) |
| GEQLYISVISPARSL | 49 | M.33 (29-43), M.57 (38-52) |
| DSSEYAFRTAVSSM | 50 | M.518 (9-23) |
| TGNLRLDNTTLIDKD | 50 | M.538 (43-57) |
| EIPMIQNILSRSQIF | 50 | M.518 (87-101) |
| SRSQIFDGIPNLMSL | 50 | M.518 (96-110) |
| DGIPNLMSLDNVVKI | 50 | M.518 (102-116) |
| IWVNVEYDSFYREHG | 50 | M.518 (122-136) |
| EFPVIWVSSPEVALL | 50 | M.518 (149-163) |
| SPEVALLKSLAGKLR | 50 | M.518 (157-171) |
| AGKLRNSTKLIFRFL | 50 | M.518 (167-181) |
| ETKLIFRFLREDLVE | 50 | M.518 (173-187) |
| GELLKDLKSIKAFAS | 50 | M.518 (195-209) |
| LKSIKAFASGILVPK | 50 | M.538 (201-215) |
| CEGILKLLETHLVPS | 51 | M.267 (9-23), M.270 (14-28) |
| LTETHLVPSSTAPHS | 51 | M.267 (15-29), M.270 (20-34) |
| PESKVFYLKMKGDYH | 51 | M.267 (27-41), M.270 (32-46) |
| MNSYKAAQDIALADL | 51 | M.150 (38-52), M.267 (81-75), M.270 (66-80), M.73 (23-37) |
| AFTHPIRLGLALKIS | 51 | M.73 (38-52) |
| LLGLLAPLASAQLSR | 52 | M.505 (0-14), M.667 (0-14), M.679 (0-14), M.680 (0-14) |
| PDAEKIVAVIEKKL | 52 | M.488 (4-18), M.505 (22-36), M.667 (22-36), M.679 (22-36), M.680 (22-36) |
| AGLLFLLFHDCFANG | 52 | M.488 (26-40), M.505 (44-58), M.667 (44-58), M.679 (44-58), M.680 (44-58) |
| CDASILIDPLSNQSA | 52 | M.230 (1-15), M.445 (9-23), M.488 (41-55), M.505 (59-73), M.667 (59-73), M.679 (59-73), M.680 (59-73) |
| IDSSYFANYLAKKMP | 52 | M.530 (104-118), M.667 (228-242), M.679 (228-242), M.680 (228-242) |
| KPNDFMPTFAKAMEK | 52 | M.530 (141-155), M.667 (265-279), M.679 (265-279), M.680 (265-279) |
| PTFANAMEMLSVLKV | 52 | M.530 (147-161), M-679 (271-285), M.680 (271-285) |
| GGSVIRISSANPEDL | 52 | M.530 (184-198), M.667 (308-322), M.679 (308-322), M.680 (308-322) |
| DPWHVKTLKAAGAAH | 52 | M.530 (218-232), M.667 (342-385), M.679 (342-356), M.680 (342-356) |
| WSEIQTLKPNLIGPF | 53 | M.436 (0-14), N.534 (0-14) |
| NEMTLAGFLDYANAS | 53 | M.436 (30-44), M.487 (29-43), M.508 (27-41), M.534 (30-44), M.613 (29-43), M.688 (28-42) |
| NISGILIGIENAAYL | 53 | M.436 (45-59), M.487 (44-58), M.508(42-56), M.534(45-59), M.613(44-58), M.688(43-57) |
| AAYLATRGLDVVDAV | 53 | M.436 (56-70), M.487 (55-69), M.508 (53-67), M.534 (56-70), M.562(10-24), M.572 (1-15), M.613 (55-69), M.688(54-68) |
| GLDVVDAVSNALIKS | 53 | M.436 (63-77), M.487 (62-76), M.508 (60-74), M.534 (63-77), M.552 (17-31), M.572 (8-22), M.613 (62-76), M.688 (61-75) |
| IKQQVFIQSEDFPVL | 53 | M.336 (19-33), M.436 (83-97), M.487 (82-96), M.508 (80-54), M.534 (83-97), M.552 (37-51), M.572 (28-42), M.613 (82-96) |
| | | M.688 (81-95) |
| PVLSAFKKEPKFNRV | 53 | M.336 (31-45), M.436 (95-109), M.487 (94-108), M.508 (92-106), M.534 (95-109), M.552 (49-63), M.572 (40-54), M.613 |
| | | (94-108), M.688 (93-107) |
| KFPKFNRVFEIEFDI | 53 | M.336 (38-52), M.436 (102-116), M.487 (101-115), M.508 (89-113), M.534 (102-116), M.552 (56-70), M.572 (47-61), M.613 |
| | | (101-115), M.688 (100-114) |
| VEIKEFANAVKLRRS | 53 | M.336 (61-75), M.436 (125-139), M.487 (124-138), M.508 (122-136), M.534 (125-139), M.552 (79-93), M.572 (70-84) |
| | | M.613 (124-138), M.688 (123-137) |
| VKLRRSSAAQVDFGFY | 53 | M.336 (70-84), M.436 (114-146), M.487 (133-147), M.508 (131-145), M.534 (134-148), M.552 (88-102), M.572 (79-93) |
| | | M.613 (133-147), M.688 (132-146) |
| GFYLTGFNAVVERLR | 53 | M.336 (82-96), M.436 (146-160), M.487 (145-159), M.508 (143-157), M.534 (146-160), M.552 (100-114), M.572 (91-105) |
| | | M.613 (145-159), M.688 (144-158) |
| GVLKNEEMSLAFDYW | 53 | M.487 (168-182), M.508 (166-180), M.534 (169-183), M.552 (123-137), M.572 (114-128), M.613 (168-182), M.668 (167-181) |
| GLVTEFPSTAAAYFR | 53 | M.534 (201-215), M.552 (155-169), M.572 (146-160), M.613 (200-214), M.688 (199-213) |
| NIVVNVFNQLDQPLL | 54 | M.384 (38-52) |
| QPLLFTWNVIQRRKN | 54 | M.384 (49-63) |
| IGSFFYFPSIGMQRT | 54 | M.127 (12-26), M.145 (12-126), M.147 (36-80), M.213 (26-39), M.220 (25-39), M.384 (92-106) |
| GYGLISVVSRLLIPV | 54 | M.127 (29-43), M.145 (29-43), M.147 (33-47), M.213 (42-26), M.220 (42-56), M.384 (109-123) |
| VVSRLLIPVFFDFPA | 54 | M.127 (35-49), M.145 (35-49), M.213 (48-62), M.220 (48-62), M.384 (115-128) |
| VCTRLSPFCCLYCIL | 17 | M.577 (1-15), M.717 (1-15), M.719 (1-15), M.724 (1-15), M.727 (1-15 |
| YCILCCWYSMRLVTV | 17 | M.577 (12-26), M.717 (12-26), M.719 (12-26), M.724 (12-26), M.727 (12-26) |
| NIWADDLAASLSTLE | 76 | MN.169 (10-24) |
| TAIAFLSVSNNYEYI | 76 | MN.124 (0-14) |
| VSNNYEYILSDKLVV | 76 | MN.124 (7-21) |
| KDKLVVSISCSLMHT | 76 | MN.169 (32-46) |
| TSCSLMHTAVDLVNE | 76 | MN.124 (23-37), MN.169 (39-53) |
| TKLDSETKSKLAFAA | 76 | MN.124 (38-52), MN.169 (54-68) |
| IKSWLAFAAQKVVEV | 76 | MN.124 (44-58), MN.169 (60-74) |
| KVVEVNALGKALVGL | 76 | MN.124 (54-68), MN.169 (70-84) |
| LKDEAYFAANAAAQA | 76 | MN.124 (68-82), MN.169 (84-98) |
| EAYVSAIKEEISKVV | 76 | MN.124 (158-172), MN.169 (174-188), MN.82 (13-37) |
| ISKVVKIQEELDIDV | 76 | MN.124 (168-182), MN.169 (184-198), MN.82 (23-37) |
| MVEYFGEQLSGFATT | 76 | MN.169 (209-223), MN.82 (48-62) |
| LSGFAFTANGWVQSY | 76 | MN.169 (217-221), MN.82 (56-70) |
| NPMIVFWSFMAWSMT | 76 | MN.169 (249-263), MN.82 (88-102) |
| EGPLMLYVSKMIPAS | 77 | MN.206 (2-16), MN.210 (2-16) |
| NGRFFAFGRVFAGHR | 77 | MN.208 (18-32), MN.210 (18-32) |
| GNTVALVGLDQFITK | 77 | MN.206 (78-92), MN.210 (78-92) |
| VGLDQFITKNATLTG | 77 | MN.206 (84-98), MN.210 (84-98) |
| PIRAMKFSVSPVVRV | 77 | MN.206 (106-120), MN.210 (106-120) |
| FNGGAEIIVSPPVVS | 77 | MN.201 (49-63), MN.206 (178-192), MN.210 (178-192) |
| SPPVVSFRETVLDKS | 77 | MN.201 (58-72), MN.206 (187-201), MN.210 (187-201) |
| NKHNRLYMEARPLEE | 77 | MN.201 (82-96), MN.206 (213-225), MN.210 (211-225) |
| PTARRVIFASQTAK | 77 | MN.136 (42-56), MN.140 (49-63), MN.173 (68-82), MN.183 (102-116), MN.184 (102-116), MN.185 (94-108), MN.193 (101-115), |
| | | MN.201 (208-222), MN.206 (337-351), MN.210 (337-351) |
| AKPRLLEFVYLVEIQ | 77 | MN.136 (55-69), MN.140 (62-76), MN.173 (81-95), MN.183 (135-129), MN.184 (115-129), MN.185 (107-121), MN.193 |
| | | (114-128), MN.201 (221-235), MN.206 (350-364), MN.210 (350-364) |
| EPVYLVEIQAPEGAL | 77 | MN.136 (61-75), MN.140 (68-82), MN.173 (87-101), MN.183 (121-135), MN.184 (121-135), MN.185 (113-127), MN.193 |
| | | (120-134), MN.201 (227-241), MN.206 (356-370), MN.210 (356-370) |
| PLYNIKAYLPVIESF | 77 | MN.136 (99-113), MN.140 (106-120), MN.173 (125-139), MN.183 (159-173), MN.184 (159-173), MN.185 (191-169), |
| | | MN.193 (158-172), MN.201 (265-279), MN.206 (394-408), MN.210 (394-408) |
| LPVIESFGFSATLRA | 77 | MN.136 (107-121), MN.140 (114-128), MN.173 (133-147), MN.183 (167-181), MN.184 (167-181), MN.185 (159-173), |
| | | MN.193 (166-180), MN.201 (273-287), MN.206 (402-416), MN.210 (402-416) |
| FGFSATLRAATSGQA | 77 | MN.136 (113-127), MN.140 (120-134), MN.173 (139-153), MN.183 (173-187), MN.184 (173-187), MN.185 (165-179), |
| | | MN.193 (172-185), MN.201 (229-293), MN.206 (408-422), MN.210 (408-422) |
| SLKLHKACEAFNPYD | 78 | MN.12 (4-18) |
| CAFDPYYGKISLSKV | 78 | MN.15 (32-25), MN.38 (27-41) |
| SKVRSFLTEAKAKHI | 78 | MN.12 (24-38), MN.15 (24-38), MN.35 (39-53), MN.38 (39-53), MN.41 (40-54) |
| LTEAHAKHIEWNCDV | 78 | MN.12 (30-44), MN.15 (30-44), MN.3 (13-27), MN.35 (45-59), MN.38 (45-59), MN.41 (46-60), MN.47 (47-61) |
| KEKRWNAALTSISAS | 78 | MN.86 (64-78) |
| GSAYVDLGSLLAERT | 78 | MN.86 (81-95) |
| RHLARQFIPHLHQRF | 78 | MN.83 (0-14), MN.94 (0-14) |
| FIPHLHQRFIHPPIH | 78 | MN.83 (6-20), MN.94 (6-20) |
| NTMENLSSTIFSFVI | 78 | MN.14 (1-15), MN.33 (10-24), MN.46 (22-36), MN.74 (0-14), MN.83 (23-37), MN.94 (23-37) |
| TIFSFVILLSASASL | 78 | MN.14 (9-23), MN.17 (6-20), MN.20 (6-20), MN.30 (12-26), MN.33 (18-32), MN.46 (30-44), MN.67 (6-20), MN.74 (8-22), |
| | | MN.8 (1-19), MN.83 (31-45), MN.94 (31-45) |
| ILLSASAELVVAGDP | 78 | MN.14 (15-29), MN.17 (12-26), MN.20 (12-26), MN.30 (18-32), MN.33 (24-38), MN.45 (36-50), MN.67 (12-26), MN.8 (7-21), |
| | | MN.83 (37-51), MN.94 (37-51) |
| ELAEMEVSAAFRLTS | 78 | MN.51 (32-46), MN.56 (32-46), MN.59 (32-46), MN.62 (32-46), MN.63 (32-46), MN.67 (59-73), MN.74 (61-75), MN.86 (32-46), |
| | | MN.94 (84-98) |
| SAAFHLFSMAVTAAR | 78 | MN.51 (39-53), MN.56 (39-53), MN.59 (39-53), MN.62 (39-53), MN.63 (39-53), MN.67 (66-80), MN.74 (68-82), MN.86 (39-53) |
| FSMAVTAARSCQWND | 78 | MN.51 (45-59), MN.56 (49-59), MN.59 (45-59), MN.62 (45-59), MN.63 (45-59), MN.67 (72-86), MN.74 (74-88), MN.86 (45-59) |
| KISLSKVRSFLTEAK | 78 | MN.12 (20-34), MN.15 (20-34), MN.35 (35-49), MN.38 (35-49), MN.41 (36-50) |
| QQYTAALSPILFECL | 79 | MN.108 (131-145) |
| LSPILFECLIHPMLG | 79 | MN.106 (5-19), MN.90 (5-19), MN.96 (5-19) |
| VEDNLVKLKNVLNVY | 79 | MN.90 (27-41), MN.91 (0-14), MN.96 (27-41) |
| KLKNVLNVYEARLTK | 79 | MN.106 (33-47), MN.80 (4-18), MN.81 (1-15), MN.90 (33-47), MN.91 (6-20), MN.96 (33-47) |
| EVYEARLTKFNILAG | 79 | MN.36 (5-19), MN.26 (4-18) |
| IKFKYLAGDYLSLAD | 79 | MN.36 (12-26), MN.76 (11-25), MN.81 (14-28), MN.90 (46-60) |
| AGDYLSLADLNBVSI | 79 | MN.106 (52-56), MN.35 (18-32), MN.76 (17-31), MN.80 (23-37), MN.81 (20-34), MN.90 (52-66), MN.91 (25-39), MN.95 (52-66) |
| VKAWWIDLLAKPSVQ | 79 | MN.106 (85-99), MN.36 (51-65), MN.71 (25-39), MN.76 (50-64), MN.80 (56-70), MN.81 (53-67), MN.90 (85-99), MN.91 (58-72), |
| | | MN.96 (85-99) |
| KLRTICLSSIGSSCL | 80 | MN.186 (0-14) |
| LSSTGSSCLFVLILF | 80 | MN.186 (6-20) |
| EKLKFVLEVYEARLS | 81 | MN.58 (0-14) |
| SYLAGDFVSFADLNH | 81 | MN.58 (17-31) |
| FVSFADLNHFPRTFY | 81 | MN.58 (23-37) |
| FPKTFYFMAIPHASL | 81 | MN.58 (32-46) |
| HVKAWWERIMARPAV | 81 | MN.58 (52-66) |
| IMARPAVKKIAAMV | 81 | MN.58 (60-74) |
| MRKVRGFNRVHQISA | 82 | MN.107 (32-46) |
| FWRVHQISARMAPVK | 82 | MN.107 (38-52) |
| MAPVKLYGATLSWNV | 82 | MN.107 (48-62) |
| GDLYIFESRAICNYA | 82 | MN.107 (108-122), MN.6 (17-31), MN.77 (39-53) |
| EANQYTAALGPILFE | 82 | MN.107 (149-163), MN.77 (80-94) |
| ACSLFLNYAVSFNYF | 83 | MN.205 (4-18), MN.211 (4-18) |
| YAVSFNYFVCNLLQE | 83 | MN.205 (11-25), MN.211 (11-25) |
| NLLQERLKKLKSEHG | 83 | MN.205 (21-35), MN.211 (21-35) |
| GMTGMLWETSLLDPE | 83 | MN.203 (27-43), MN.204 (27-41), MN.205 (53-67), MN.211 (53-67) |
| PEGLLWLLLTGKVPT | 83 | MN.203 (69-83), MN.204 (69-83), MN.205 (95-109), MN.211 (95-109), |
| YVYKAIDALPVIAHP | 83 | MN.203 (103-117), MN.204 (103-117), MN.205 (129-143), MN.211 (129-143) |
| QFTTGVMALQVESEF | 83 | MN.203 (120-134), MN.204 (120-134), MN.205 (146-160), MN.211 (145-160) |
| EDCLNLIARLOQVAS | 83 | MN.203 (153-167), MN.204 (153-167), MN.205 (179-193), MN.211 (179-193) |
| IARLPQVASYVYRRI | 83 | MN.203 (159-173), MN.204 (159-173), MN.205 (185-199), MN.211 (185-199) |
| ADNSLDYAANFSHML | 83 | MN.203 (182-196), MN.204 (182-196), MN.205 (208-222), MN.211 (208-222) |
| DPKMLELMRLYITIH | 83 | MN.203 (200-214), MN.204 (200-214), MN.205 (226-240), MN.211 (226-240) |
| ALSDPYLSFAAALNG | 83 | MN.203 (233-247), MN.204 (238-247), MN.205 (259-273), MN.211 (259-273) |
| LSFAAALNGLAGPLH | 83 | MN.203 (239-253), MN.204 (239-253), MN.205 (265-279), MN.211 (265-279) |
| PLHGLANQEVLLWIN | 83 | MN.203 (251-265), MN.204 (251-265), MN.205 (277-291), MN.211 (277-291) |
| QEVLLWIKSVMEETG | 83 | MN.203 (258-272), MN.204 (258-272), MN.205 (184-298), MN.211 (284-298) |
| QLKEYVWKTLKSGKV | 83 | MN.203 (279-293), MN.204 (279-293), MN.205 (905-319), MN.211 (909-319) |
| EDPLFQLVSKLYEVV | 83 | MN.123 (17-31), MN.203 (322-336), MN.204 (322-336), MN.205 (348-362), MN.211 (348-362), MN.69 (0-14), MN.98 (17-31) |
| LVSKLYEVVFGILTE | 83 | MN.123 (23-37), MN.203 (328-342), MN.204 (328-342), MN.205 (354-368), MN.211 (364-368), MN.69 (6-20), MN.98 (23-37) |
| SGVLLNHFGLVEARY | 83 | MN.113 (28-42), MN.123 (52-66), MN.203 (357-371), MN.204 (357-371), MN.205 (383-397), MN.211 (383-397), MN.68 |
| | | (28-42), MN.69 (35-49), MN.93 (28-42), MN.98 (52-66) |
| IVLFGVSRSMGIGSQ | 83 | MN.113 (44-58), MN.123 (68-82), MN.203 (979-387), MN.204 (373-387), MN.205 (399-419), MN.211 (399-413), MN.68 |
| | | (44-58), MN.69 (51-65), MN.93 (44-58), MN.98 (68-82) |
| GSQLIWDRALGLPLE | 83 | MN.113 (56-70), MN.123 (80-94), MN.203 (385-399), MN.204 (385-399), MN.205 (411-425), MN.211 (411-425), MN.68 |
| | | (56-70), MN.69 (63-77), MN.93 (56-70), MN.98 (80-94) |
| GPVTILNWSFVENDQ | 84 | MN.105 (9-23), MN.166 (5-19), MN.167 (6-20), MN.172 (9-23), MN.178 (9-23), MN.182 (5-19) |
| PRFETCYQIALAIKK | 84 | MN.105 (24-38), MN.166 (20-34), MN.167 (21-35), MN.168 (10-24), MN.172 (24-38), MN.178 (24-38), MN.182 (20-34) |
| GIQVIQIDEAALREG | 84 | MN.105 (47-61), MN.166 (43-57), MN.167 (44-58), MN.168 (33-47), MN.172 (47-61), MN.178 (47-61), MN.182 (43-57) |
| EHAFYLDWAVHSFRI | 84 | MN.105 (68-82), MN.166 (64-78), MN.167 (65-79), MN.168 (54-68), MN.172 (68-82), MN.178 (68-82), MN.182 (64-78) |
| FNDITHSITNMDADV | 84 | MN.105 (102-115), MN.166 (98-112), MN.167 (99-113), MN.168 (88-102), MN.172 (102-316), MN.178 (302-115), MN.182 |
| | | (98-112) |
| SDEKLLSVFREGVTY | 84 | MN.105 (124-138), MN.166 (120-134), MN.167 (121-135), MN.168 (110-124), MN.172 (124-138), MN.178 (124-138), |
| | | MN.182 (120-134) |
| VNKMLAVLDTNILWV | 84 | MN.166 (160-174), MN.167 (161-175), MN.168 (150-164), MN.172 (164-178), MN.178 (164-178), MN.182 (160-174) |
| TRKYAEVMPALTNMV | 84 | MN.166 (182-196), MN.167 (183-197), MN.168 (172-186), MN.172 (186-200), MN.178 (186-200), MN.182 (182-196) |
| PALTNMVTAAKLIPT | 84 | MN.166 (190-204), MN.167 (191-205), MN.168 (180-194), MN.172 (194-208), MN.178 (194-208), MN.182 (190-204) |
| VTAAKLIRTQLASTK | 84 | MN.166 (196-210), MN.167 (197-211), MN.168 (186-200), MN.172 (200-214), MN.178 (200-214), MN.182 (196-210) |
| GRGIKDFGLVVAPGG | 85 | MN.39 (9-23) |
| LTVGNIIAGDRFSMA | 85 | MN.39 (28-42) |
| DRFSMAYDRTPEEIL | 85 | MN.39 (37-51) |
| YDRTPEEILAIVYGT | 85 | MN.39 (43-57) |
| EILAIVYGIGNPAQA | 85 | MN.39 (49-63) |
| TREENVYMAKLAEQA | 86 | MN.102 (6-20), MN.116 (6-20), MN.117 (6-20), MN.181 (6-20), MN.194 (6-20), MN.195 (6-20), MN.202 (6-20) |
| YEEMVEFMEKVAKTA | 86 | MN.102 (23-37), MN.116 (23-37), MN.117 (23-37), MN.156 (11-25), MN.181 (23-37), MN.194 (23-37), MN.195 (23-37), |
| | | MN.202 (23-37) |
| EERNLLSVAYKNVIG | 86 | MN.102 (45-59), MN.116 (45-59), MN.117 (45-59), MN.156 (33-47), MN.181 (45-59), MN.194 (45-59), MN.195 (45-59), |
| | | MN.202 (45-59) |
| AYKNVIGARRASWRI | 86 | MN.102 (53-67), MN.116 (53-67), MN.117 (53-67), MN.156 (41-55), MN.181 (53-67), MN.194 (53-67), MN.195 (53-67), |
| | | MN.202 (53-67) |
| RRASWRIISSIEQKE | 86 | MN.102 (61-75), MN.116 (61-75), MN.117 (61-75), MN.156 (49-63), MN.181 (61-75), MN.194 (61-75), MN.195 (61-75), |
| | | MN.202 (61-75) |
| NEAYVASINEYRTRI | 86 | MN.101 (10-24), MN.102 (80-94), MN.116 (80-94), MN.117 (80-94), MN.156 (68-82), MN.181 (80-94), MN.194 (80-94), |
| | | MN.195 (80-94), MN.202 (80-94) |
| SKICDGILKLLDSHL | 86 | MN.101 (29-43), MN.102 (99-113), MN.116 (99-113), MN.117 (99-113), MN.156 (87-101), MN.181 (99-113), MN.194 (99-113), |
| | | MN.195 (99-113), MN.202 (99-113) |
| ILKLLDSRLVFSATA | 86 | MN.101 (35-49), MN.102 (105-119), MN.116 (105-119), MN.117 (105-119), MN.156 (93-107), MN.181 (105-119), MN.194 |
| | | (105-119), MN.195 (105-119), MN.202 (105-119) |
| AESKVFYLKMKGDYH | 86; 51 | M.150 (4-18), MN.101 (50-64), MN.102 (120-134), MN.116 (120-134), MN.117 (120-134), MN.156 (108-122), MN.181 (120-134), |
| | | MN.194 (120-134), MN.195 (120-134), MN.202 (120-134) |
| GDYRRYLAEFKAGAE | 86 | MN.101 (61-75), MN.116 (131-145), MN.156 (119-139), MN.183 (131-145), MN.194 (131-145), MN.195 (131-145), MN.202 |
| | | (131-145) |
| NILVAYKSAQDIALA | 86 | MN.101 (82-96), MN.156 (140-154), MN.163 (9-23), MN.175 (9-23), MN.181 (152-166), MN.194 (152-166), MN.195 (152-166), |
| | | MN.202 (152-166), MN.97 (6-20) |
| LPTTAPIRLGLALNF | 86 | MN.101 (98-112), MN.156 (156-170), MN.163 (25-39), MN.175 (25-39), MN.181 (158-182), MN.194 (168-182), MN.195 |
| | | (168-182), MN.202 (168-182), MN.97 (22-36) |
| IRLGLALNFSVFYYE | 86 | MN.101 (104-118), MN.156 (162-176), MN.163 (31-45), MN.175 (31-45), MN.181 (174-188), MN.194 (174-188), MN.195 |
| | | (174-188), MN.202 (174-188), MN.97 (28-42) |
| LNPSVFYYETLNSPD | 86 | MN.101 (110-124), MN.156 (168-182), MN.163 (37-53), MN.175 (37-51), MN.181 (180-194), MN.194 (180-194), MN.195 |
| | | (180-194), MN.202 (180-194), MN.97 (34-48) |
| YKDSTLIMQLLRDNL | 86 | MN.156 (207-221), MN.163 (76-90), MN.175 (76-90), MN.181 (219-233), MN.194 (219-233), MN.195 (219-233), MN.202 |
| | | (219-233), MN.54 (37-51), MN.97 (73-84) |
| TMQLLRDNLTLWTSD | 86 | MN.156 (213-227), MN.163 (82-96), MN.175 (82-96), MN.181 (225-239), MN.194 (225-239), MN.195 (225-239), MN.202 |
| | | (225-239), MN.54 (43-37), MN.97 (79-93) |
| GSRALPFLLQLTKQP | 87 | MN.153 (7-21) |
| VKVYVVYYSMYGHVG | 87 | MN.153 (50-64), MN.157 (26-40), MN.95 (2-16) |
| GVEVKVWQVPEILSE | 87 | MN.118 (2-16), MN.122 (9-23), MN.128 (9-23), MN.153 (79-93), MN.92 (16-30), MN.95 (31-45) |
| ADGILFGFPTRFGMM | 87 | MN.114 (30-44), MN.118 (41-55), MN.119 (30-44), MN.122 (48-62), MN.128 (48-62), MN.153 (118-132), MN.157 (94-108), |
| | | MN.92 (55-69), MN.95 (70-84), MN.99 (14-28) |
| FHQGKYFAGIAKKLK | 87 | MN.114 (145-159), MN.118 (156-170), MN.119 (145-159), MN.122 (163-177), MN.128 (163-177), MN.157 (209-223), |
| | | MN.99 (129-143) |
| DVYPIVCLPMCVCVL | 88 | MN.72 (3-15) |
| EPAYFATAESVRDHL | 89 | MN.199 (20-34), MN.207 (18-32), MN.224 (20-34) |
| QTYYLSMEYLQGRAL | 89 | MN.199 (62-66), MN.207 (50-64), MN.224 (52-68) |
| AVGNLGITGAYAEAV | 89 | MN.199 (69-83), MN.207 (67-81), MN.224 (69-83) |
| AEAVKKFGYELEALA | 89 | MN.199 (80-94), MN.207 (78-92), MN.224 (80-94) |
| RLAACFLDSMATLNL | 89 | MN.199 (109-123), MN.207 (107-121), MN.214 (3-17), MN.218 (0-14), MN.219 (3-17), MN.220 (3-17), MN.221 (4-18), |
| | | MN.222 (4-18), MN.223 (26-40), MN.224 (109-123) |
| LRYRYGLSKQRIAKC | 89 | MN.199 (130-144), MN.207 (128-142), MN.214 (24-38), MN.218 (21-35), MN.219 (24-38), MN.220 (24-38), MN.221 (25-39), |
| | | MN.222 (25-39), MN.223 (47-61), MN.224 (130-144) |
| FSPWEIVRHDVVYPV | 89 | MN.199 (157-171), MN.207 (155-169), MN.214 (51-65), MN.215 (26-40), MN.216 (25-39), MN.217 (26-40), MN.218 (48-62), |
| | | MN.219 (51-65), MN.220 (51-65), MN.221 (52-66), MN.222 (52-66), MN.223 (74-88), MN.222 (157-171) |
| VYPVRFFGHVEILPD | 89 | MN.207 (166-180), MN.214 (62-76), MN.216 (36-50), MN.219 (62-76), MN.220 (62-76), MN.221 (63-77), MN.222 (63-77), |
| | | MN.223 (85-99) |
| GEVLNALAYDVPIPG | 89 | MN.199 (190-204), MN.207 (188-202), MN.214 (84-98), MN.215 (59-73), MN.216 (58-72), MN.217 (59-73), MN.218 (81-95), |
| | | MN.219 (84-98), MN.220 (84-98), MN.221 (85-99), MN.222 (85-99), MN.223 (107-121), MN.224 (190-204) |
| IPGYKTKNAISLRLW | 89 | MN.199 (202-216), MN.207 (200-214), MN.214 (96-110), MN.215 (71-85), MN.216 (70-84), MN.217 (73-85), MN.218 (93-107), |
| | | MN.219 (96-110), MN.220 (96-110), MN.221 (97-111), MN.222 (97-111), MN.223 (119-133), MN.224 (202-216) |
| AEDFNLFQFNDGQYE | 89 | MN.199 (222-236), MN.207 (220-234), MN.214 (116-130), MN.215 (91-105), MN.216 (90-104), MN.217 (91-105), MN.218 |
| | | (113-127), MN.219 (116-130), MN.220 (116-130), MN.221 (117-131), MN.222 (117-131), MN.223 (139-153), MN.224 (222-236) |
| EGKLLRLKQQFFLCS | 89 | MN.199 (260-274), MN.207 (258-272), MN.214 (154-168), MN.215 (129-143), MN.216 (128-142), MN.217 (129-143), |
| | | MN.218 (151-165), MN.219 (154-168), MN.220 (154-168), MN.221 (155-169), MN.222 (155-169), MN.223 (177-191) |
| | | MN.224 (260-274) |
| LKQQFFLCSASLQDI | 89 | MN.199 (266-280), MN.207 (264-278), MN.214 (160-174), MN.215 (135-149), MN.216 (134-148), MN.217 (135-149), |
| | | MN.218 (157-171), MN.219 (160-174), MN.220 (160-174), MN.221 (161-175), MN.222 (161-175), MN.223 (183-197), |
| | | MN.224 (266-280) |
| PTLAIPELMRLLMDE | 89 | MN.199 (312-325), MN.207 (310-324), MN.234 (206-220), MN.215 (181-195), MN.216 (180-194), MN.217 (181-195), |
| | | MN.218 (203-217), MN.219 (206-220), MN.220 (206-220), MN.221 (207-221), MN.222 (207-221), MN.223 (229-243) |
| | | MN.224 (312-326) |
| QSVMRKLLPRQMEII | 89 | MN.199 (359-373), MN.207 (357-371), MN.214 (253-267), MN.215 (228-242), MN.216 (227-241), MN.217 (228-242), |
| | | MN.218 (250-264), MN.219 (253-267), MN.220 (253-267), MN.221 (254-268), MN.222 (254-268), MN.223 (276-290) |
| | | MN.224 (359-373) |
| EEIDKRPREMVISTR | 89 | MN.207 (372-385), MN.214 (268-282), MN.235 (243-257), MN.216 (242-256), MN.217 (243-257), MN.238 (265-279), |
| | | MN.219 (268-282), MN.220 (268-282), MN.221 (269-283), MN.222 (269-283), MN.223 (291-305), MN.224 (374-386) |
| PQKPVVRMANLCVVS | 89 | MN.207 (403-417), MN.214 (299-313), MN.215 (274-288), MN.216 (273-287), MN.217 (274-288), MN.218 (296-310), |
| | | MN.219 (299-313), MN.220 (299-313), MN.221 (300-314), MN.222 (300-314), MN.223 (322-336), MN.224 (405-419) |
| ILKEELFADYVSIWP | 89 | MN.207 (431-445), MN.214 (327-341), MN.215 (302-316), MN.216 (301-315), MN.217 (302-316), MN.218 (324-338), |
| | | MN.207 (327-341), MN.220 (327-341), MN.221 (328-342), MN.222 (328-342), MN.223 (350-364), MN.224 (433-447) |
| PRRWLRFCNPELSEI | 89 | MN.207 (457-471), MN.214 (353-367), MN.215 (328-342), MN.216 (327-341), MN.217 (328-342), MN.218 (350-364), |
| | | MN.219 (353-367), MN.220 (353-367), MN.221 (354-368), MN.222 (354-368), MN.223 (376-390), MN.224 (459-473) |
| EKLHAEWAAAKLASK | 89 | MN.214 (394-408), MN.215 (369-383), MN.216 (368-382), MN.217 (369-383), MN.218 (391-405), MN.219 (394-408), |
| | | MN.220 (394-408), MN.221 (385-408), MN.222 (395-409), MN.223 (417-431), MN.224 (500-514) |
| IKRIHEYKRQLMNTL | 89 | MN.214 (433-447), MN.215 (408-422), MN.216 (407-421), MN.217 (408-422), MN.218 (430-444), MN.219 (433-447), |
| | | MN.220 (433-447), MN.221 (434-448), MN.222 (434-448), MN.223 (456-470), MN.224 (539-553) |
| YKRQLMNTLGAVYRY | 89 | MN.214 (439-453), MN.215 (414-428), MN.216 (413-427), MN.217 (414-428), MN.218 (436-450), MN.219 (439-453), |
| | | MN.220 (439-453), MN.221 (440-454), MN.222 (440-454), MN.223 (462-476), MN.224 (545-559) |
| LGAVYRYKKLKEMSA | 89 | MN.214 (447-461), MN.215 (422-436), MN.216 (421-435), MN.217 (422-436), MN.218 (444-458), MN.219 (447-461), |
| | | MN.220 (447-461), MN.221 (448-462), MN.222 (448-462), MN.223 (470-484), MN.224 (553-567) |
| GKAFATYTNAKRIVK | 89 | MN.214 (476-490), MN.215 (451-465), MN.216 (450-464), MN.217 (451-465), MN.218 (473-487), MN.219 (476-490), |
| | | MN.220 (476-490), MN.221 (477-491), MN.222 (477-493), MN.223 (499-513), MN.224 (582-596) |
| KRIVKLVNDVGAVVN | 89 | MN.214 (486-500), MN.215 (461-475), MN.216 (460-474), MN.217 (461-475), MN.218 (483-497), MN.219 (486-500), |
| | | MN.220 (486-500), MN.221 (487-501), MN.222 (487-501), MN.223 (509-523), MN.224 (592-606) |
| VNKYLKVVFIPNYNV | 89 | MN.214 (505-519), MN.215 (480-494), MN.216 (479-493), MN.217 (480-494), MN.218 (502-516), MN.219 (505-519), |
| | | MN.220 (505-519), MN.221 (506-520), MN.222 (506-520), MN.223 (528-542), MN.224 (611-625) |
| VFIPNYNVSVAEVLI | 89 | MN.214 (512-526), MN.215 (487-501), MN.216 (486-500), MN.217 (487-501), MN.218 (509-523), MN.219 (512-526), |
| | | MN.220 (512-526), MN.221 (513-527), MN.222 (513-527), MN.223 (535-549), MN.224 (618-632) |
| EDNFFLFQAKADQVA | 89 | MN.214 (574-588), MN.215 (549-563), MN.216 (548-562), MN.217 (549-563), MN.218 (571-585), MN.219 (574-588), |
| | | MN.220 (574-568), MN.221 (575-589), MN.222 (575-589), MN.223 (597-611), MN.224 (680-694) |
| TFGTYDYTPLLDSLE | 89 | MN.214 (616-630), MN.215 (591-605), MN.216 (590-604), MN.217 (591-605), MN.218 (613-627), MN.219 (616-630), |
| | | MN.220 (616-630), MN.221 (617-631), MN.222 (617-631), MN.223 (639-653), MN.224 (722-736) |
| FLVGYDFPSYIDAQA | 89 | MN.214 (641-655), MN.216 (615-629), MN.218 (638-652), MN.219 (641-655), MN.220 (641-655), MN.221 (642-656), |
| | | MN.222 (642-650), MN.223 (664-678), MN.224 (747-761) |
| KRWIKMSILNTAGSG | 89 | MN.216 (639-653), MN.218 (662-676), MN.219 (665-679), MN.220 (665-679), MN.221 (666-680), MN.222 (666-680), |
| | | MN.223 (688-702), MN.224 (771-785) |
| QYAKEIWGITANPVP | 89 | MN.216 (663-677), MN.218 (686-700), MN.219 (689-703), MN.220 (689-703), MN.221 (690-704), MN.222 (690-704), |
| | | MN.223 (712-726), MN.224 (795-809) |
| KTLAVALGGARPLAT | 90 | MN.111 (24-38), MN.142 (17-31), MN.158 (25-39), MN.162 (32-46) |
| LAIRGVATFTLPDLP | 90 | MN.111 (36-50), MN.141 (0-14), MN.142 (29-43), MN.158 (37-51), MN.162 (44-58) |
| PDLPYDYGALEPAIS | 90 | MN.111 (47-61), MN.141 (11-25), MN.142 (40-54), MN.158 (48-62), MN.162 (55-69) |
| HATYVANYNKALEQL | 90 | MN.111 (73-87), MN.141 (37-51), MN.142 (66-80), MN.158 (74-88), MN.162 (81-95) |
| GDASAVVQLQGAIKF | 90 | MN.111 (94-108), MN.141 (58-72), MN.142 (87-101), MN.158 (95-109), MN.162 (102-116) |
| DPLVTKGANLIPLLG | 90 | MN.112 (73-87), MN.141 (153-167), MN.142 (182-196), MN.158 (190-204), MN.162 (197-211), MN.53 (24-38) |
| ANLIPLLGIDVWEHA | 90 | MN.112 (80-94), MN.141 (160-174), MN.142 (189-203), MN.158 (197-211), MN.162 (204-218), MN.53 (31-45) |
| HAYYLQYKNVRPDYL | 90 | MN.112 (93-107), MN.141 (173-187), MN.158 (210-224), MN.162 (217-231), MN.53 (44-58) |
| PDYLTNIWKVVNWKY | 90 | MN.112 (104-118), MN.141 (184-198), MN.158 (221-235), MN.162 (228-242), MN.53 (55-69) |
| APSGRIVMELYADVV | 91 | MN.121 (15-29), MN.127 (15-29), MN.132 (15-29), MN.139 (15-29), MN.146 (15-29) |
| VMELYADVVPKTAEN | 91 | MN.120 (28-42), MN.121 (21-35), MN.127 (21-35), MN.130 (40-54), MN.132 (21-35), MN.139 (21-35), MN.146 (21-35) |
| HYKGSSFHRVIPGFM | 91 | MN.120 (61-75), MN.121 (54-68), MN.127 (54-68), MN.130 (73-87), MN.132 (54-68), MN.139 (54-68), MN.146 (54-68) |
| SIYGAKFADENFIKK | 91 | MN.120 (91-105), MN.121 (84-98), MN.127 (84-98), MN.130 (103-117), MN.132 (84-98), MN.139 (84-98), MN.146 (84-98) |
| NGSQFFLCTAKTAWL | 91 | MN.120 (122-136), MN.121 (115-129), MN.127 (115-129), MN.130 (134-148), MN.132 (115-129), MN.139 (115-129), |
| | | MN.146 (115-129), MN.64 (27-41), MN.87 (54-68), MN.89 (58-72) |
| SQVHIRRPGGAGRDG | 92 | MN.37 (0-14) |
| PPGGAGRDGGQLRIP | 92 | MN.37 (6-20) |
| RDGGQLRIPSLLHGG | 92 | MN.37 (12-26) |
| GHGCAQPAMERRKHI | 92 | MN.37 (26-40) |
| RKHIEWNCDVCRHGD | 92 | MN.37 (37-51) |
| WTTVMRASCGHHRFR | 93 | MN.164 (0-14) |
| RFRDCVISSLADFKL | 93 | MN.164 (12-26) |
| ISSLADFKLFPVLQH | 93 | MN.164 (18-32) |
| PVLQHIISIAVLAIF | 93 | MN.164 (28-42) |
| ISIAVLAIFIGLLMI | 93 | MN.164 (34-48) |
| DEKLLSVFREGVVYG | 16 | MN.66 (2-16) |
| GPGVYDIHSPRIPSK | 84; 16 | MN.4 (12-26), MN.66 (20-34) |
| EEIADDFALFRGTRP | 16 | MN.66 (35-49) |
| FALFRGTRPPRRPKK | 16 | MN.66 (41-55) |
| LCPGFCLADVTPETY | 16 | MN.66 (67-81) |
| SCRGRCPCSLRTPAW | 66 | ME.3566 (3-17) |
| SLRTPAWGSCSRMAP | 66 | ME.3566 (11-25) |
| WGSCSRMAPCNCRCP | 66 | ME.3566 (17-31) |
| NCRCPCSTRGARRRL | 66 | ME.3566 (27-41) |
| STRGARRRLPGRTSS | 66 | ME.3566 (33-47) |
| PWRPPRRWSCCPLPW | 68 | ME.3720 (7-21), ME.3805 (7-21) |
| SCCPLPWPGTRRWWF | 68 | ME.3720 (15-29), ME.3805 (15-29) |
| GTRRWWFRCHQPPSS | 68 | ME.3720 (23-37), ME.3805 (23-37) |
| FRCHQPPSSRTAPGS | 68 | ME.3720 (29-43), ME.3805 (29-43) |
| PGSSRSLYGSPSTSC | 68 | ME.3720 (41-55), ME.3805 (41-55) |
| KHLIYVIGWSVYTEI | 72 | ME.4234 (7-21) |
| TGWSVYTEITLLRDA | 72 | ME.4234 (13-27) |
| SEGVRVLMLVWDDHI | 72 | ME.4210 (0-14), ME.4234 (48-62) |
| DDSGSIVQDLQISTM | 72 | ME.3897 (12-26), ME.4210 (51-65), ME.4234 (99-113) |
| LQISIMFTHKQKIVV | 72 | ME.3897 (21-35), ME.4210 (60-74), ME.4234 (108-122) |
| RRRRIMSFVGGLDLC | 72 | ME.3897 (48-62), ME.4115 (4-18), ME.4210 (87-101), ME.4234 (135-149) |
| PVAWDVLYNFEQRWR | 72 | ME.3897 (114-128), ME.4088 (28-42), ME.4115 (70-84), ME.4210 (153-167), ME.4234 (201-215) |
| GKDLLIQLRDLADEI | 72 | ME.3897 (132-146), ME.4088 (46-60), ME.4115 (88-102), ME.4210 (171-185), ME.4234 (219-233) |
| AKNVQLFRSIDGGAA | 72 | ME.3897 (160-174), ME.4088 (74-88), ME.4115 (116-130), ME.4234 (247-261) |
| DAYICAIRRAKSFIY | 72 | ME.3897 (203-217), ME.4088 (117-131), ME.4115 (159-173), ME.4210 (242-256) |
| IERAKSFIYISNQYF | 72 | ME.3897 (209-223), ME.4088 (123-137), ME.4115 (165-179), ME.4210 (248-262), ME.4234 (296-310) |
| FIYIENQYFLGSSYC | 72 | ME.3897 (215-229), ME.4088 (129-143), ME.4115 (171-185), ME.4210 (254-268), ME.4234 (302-316) |
| RFIVYVVVPMWPEGI | 72 | ME.3897 (263-277), ME.4088 (177-191), ME.4115 (219-233), ME.4210 (302-316), ME.4234 (350-364) |
| RRTMEMMYIDIAQAI | 72 | ME.3897 (291-305), ME.4088 (205-219), ME.4115 (247-261), ME.4210 (330-344), ME.4234 (378-392) |
| MYTDIAQAICARGID | 72 | ME.3897 (297-311), ME.4088 (211-225), ME.4115 (253-267), ME.4210 (336-350), ME.4234 (384-398) |
| DYLKAQQNRRFMIYV | 72 | ME.3897 (345-359), ME.4088 (259-273), ME.4115 (301-315), ME.4210 (384-398), ME.4234 (432-446) |
| FMIYVRTKMMIVDDE | 72 | ME.3897 (355-359), ME.4088 (259-283), ME.4115 (311-325), ME.4210 (394-408), ME.4234 (442-445) |
| IVDDEYIIVGSANIN | 72 | ME.3897 (365-379), ME.4088 (279-293), ME.4115 (321-335), ME.4210 (404-418), ME.4234 (452-466) |
| YDPYELRASRPARGQ | 72 | ME.4088 (310-324), ME.4115 (352-356), ME.4210 (435-449), ME.4234 (483-497) |
| GQVHGFRMALWYEHL | 72 | ME.4088 (323-337), ME.4115 (365-379), ME.4210 (448-462), ME.4234 (496-510) |
| RMALWYERLGMVDEA | 72 | ME.4088 (329-343), ME.4115 (371-385), ME.4210 (454-468), ME.4234 (502-616) |
| CVRKVNAMADRYWNL | 72 | ME.4088 (325-366), ME.4115 (394-408), ME.4210 (477-491), ME.4234 (525-539) |
| LPGVEFFFDTQARTL | 72 | ME.4088 (396-410), ME.4115 (438-452), ME.4210 (521-535), ME.4234 (569-583) |
| TAPTSRRSPSAPSPH | 67 | ME.4056 (6-20), ME.4276 (8-22) |
| THTCIETRRIPSRPI | 67 | ME.4056 (38-52), ME.4276 (40-54) |
| PWSTCRAARSPTPSA | 67 | ME.4056 (55-69), ME.4276 (57-71) |
| DRKEINLSEMVAWVG | 67 | ME.4056 (93-107), ME.4276 (95-109) |
| SEMVAWVGLQLAFWI | 67 | ME.4056 (100-114), ME.4276 (102-116) |
| VKVAPAALVNVLEAR | 69 | ME.3916 (0-14) |
| LVNVLEARSALTISV | 69 | ME.3916 (7-21) |
| ARSALTISWLRISSM | 69 | ME.3916 (13-27) |
| ISVLRISSMPFSVYH | 69 | ME.3916 (19-33) |
| LAAFWGKEYPLLSAG | 69 | ME.3916 (52-66) |
| SSPSCAPESTHAVRA | 70 | ME.3855 (0-14) |
| PESTHAVRALPSTHT | 70 | ME.3855 (6-20) |
| VRALPSIHTARILLR | 70 | ME.3855 (12-26) |
| THIARILLRSTTANV | 70 | ME.3855 (18-32) |
| LLRSITANVSGCKDR | 70 | ME.3855 (24-38) |
| VDVPGGHQGDLPRGE | 71 | ME.1412 (1-15) |
| LPGAAGEVCRRRRRR | 71 | ME.1412 (21-35) |
| GQGDVDRAQGVVGSH | 71 | ME.1412 (44-58) |
| GVVGSHLEDRHSRQA | 71 | ME.1412 (53-67) |
| LEDRRSRQAHRRLHR | 71 | ME.1412 (59-73) |
| HTFKSLFESWPVSST | 73 | ME.4280 (41-55), ME.4281 (41-55) |
| DCTIVLTTYHSGEKR | 73 | ME.4229 (33-47), ME.4231 (34-48), ME.4280 (126-140), ME.4281 (126-140) |
| FYLTYWIGKDSVLED | 73 | ME.4229 (50-64), ME.4231 (51-65), ME.4280 (143-157), ME.4281 (143-157) |
| QRMALQIATTIWNSM | 73 | ME.4190 (3-17), ME.4229 (65-79), ME.4231 (66-80), ME.4280 (158-172), ME.4281 (158-172) |
| EPPQFIALFQPMVIL | 73 | ME.4229 (93-107), ME.4231 (94-108), ME.4280 (186-200), ME.4281 (186-200) |
| KDETYEGTGIALVHI | 73 | ME.4190 (63-77), ME.4229 (125-139), ME.4231 (126-140), ME.4280 (218-232), ME.4281 (218-232) |
| GTGIALVHIHGTSIH | 73 | ME.4190 (69-83), ME.4229 (131-145), ME.4231 (132-146), ME.4280 (224-238), ME.4281 (224-238) |
| NNNTLQVDAVSISLS | 73 | ME.4190 (84-98), ME.4229 (348-160), ME.4231 (147-181), ME.4280 (239-253), ME.4281 (239-253) |
| IDCFVLQSGNSMFTW | 73 | ME.4190 (100-114), ME.4229 (162-176), ME.4231 (163-177), ME.4280 (255-269), ME.4281 (255-269) |
| QQQWAAKVAEFLEPG | 73 | ME.4190 (123-137), ME.4229 (185-199), ME.4231 (186-200), ME.4280 (278-292), ME.4281 (278-292) |
| DVLREPHLYTFSFRN | 73 | ME.4190 (170-184), ME.4229 (232-246), ME.4231 (233-247), ME.4280 (325-339), ME.4281 (325-339) |
| LEVTEVFNFSQDGLL | 73 | ME.4190 (187-201), ME.4229 (249-253), ME.4231 (250-264), ME.4280 (342-386), ME.4281 (342-356) |
| FNFSQDDLLTEDVMI | 73 | ME.4190 (193-207), ME.4229 (255-269), ME.4231 (256-270), ME.4280 (348-362), ME.4281 (348-362) |
| DVMLLDTRAEVFVWM | 73 | ME.4190 (204-218), ME.4229 (266-280), ME.4231 (267-281), ME.4280 (359-373), ME.4281 (359-373) |
| CFFRTYFSWDNTRSV | 73 | ME.4190 (263-277), ME.4229 (325-339), ME.4231 (326-340), ME.4280 (418-432), ME.4281 (418-432) |
| NSFQKKLELLFGMRS | 73 | ME.4190 (281-299), ME.4229 (343-357), ME.4231 (344-358), ME.4280 (436-450), ME.4281 (436-450) |
| RASALAALSSAFNPS | 73 | ME.4190 (310-324), ME.4229 (372-386), ME.4231 (373-387), ME.4280 (465-479), ME.4281 (465-479) |
| QRASALAALSSSLNP | 73 | ME.4190 (344-358), ME.4229 (406-420), ME.4231 (407-421), ME.4280 (499-513), ME.4281 (499-513) |
| SQRAAAVAALSNVLT | 73 | ME.4190 (375-389), ME.4229 (437-451), ME.4231 (438-452), ME.4280 (530-544), ME.4281 (530-544) |
| VAALSNVLIAEGSTL | 73 | ME.4190 (381-395), ME.4229 (449-457), ME.4231 (444-458), ME.4280 (536-550), ME.4281 (536-550) |
| ETTFSYDRLISKSTD | 73 | ME.4190 (445-459), ME.4229 (507-521), ME.4231 (508-522), ME.4280 (600-614), ME.4281 (600-614) |
| YKRRETYLSDSEFET | 73 | ME.4190 (466-480), ME.4229 (528-542), ME.4231 (529-543), ME.4280 (621-635), ME.4281 (621-635) |
| SEFETVFGVTKEEFY | 73 | ME.4190 (476-490), ME.4231 (539-553), ME.4280 (631-645), ME.4281 (631-645) |
| SRSFLKRSLLRTQRL | 73 | ME.4229 (566-880) |
| HSLLRTQRLHKFLVC | 73 | ME.4229 (572-586) |
| LRKFLVCESMIGVMA | 73 | ME.4229 (580-594) |
| SGNLVMFQMQDHQLI | 73 | ME.4229 (600-614) |
| QRIIPLISPEFLVIS | 73 | ME.4229 (612-626) |
| ISPSFLVYSFFVHDL | 73 | ME.4229 (618-632) |
| ERLIYGTANSRLCSV | 74 | ME.4230 (4-18) |
| ANSRLCSVLPKEEFY | 74 | ME.4230 (11-25) |
| VLPKEEFYQQPRNKQ | 74 | ME.4230 (18-32) |
| FYQQPRWKQELQKRK | 74; 73 | ME.1571 (24-388), ME.4190 (489-503), ME.4230 (24-38), ME.4231 (552-566), ME.4280 (644-658), ME.4281 (644-658) |
| IGAAAAMTTTIRSTA | 75 | ME.3882 (1-15) |
| TTIRSTATARPRAIV | 75 | ME.3882 (9-23) |

TABLE 3
Panel of 25 MHC II molecules for which peptide
binding affinities were predicted.

| Locus | Allele |
|---|---|
| HLA DP | DPA1*01-DPB1*0401 |
| | DPA1*0103-DPB1*0201 |
| | DPA1*0201-DPB1*0101 |
| | DPA1*0201-DPB1*0501 |
| | DPA1*0301-DPB1*0402 |
| HLA DQ | DQA1*0101-DQB1*0501 |
| | DQA1*0102-DQB1*0602 |
| | DQA1*0301-DQB1*0302 |
| | DQA1*0401-DQB1*0402 |
| | DQA1*0501-DQB1*0201 |
| | DQA1*0501-DQB1*0301 |
| HLA DR | DRB1*0101 |
| | DRB1*0301 |
| | DRB1*0401 |
| | DRB1*0404 |
| | DRB1*0405 |
| | DRB1*0701 |
| | DRB1*0802 |
| | DRB1*0901 |
| | DRB1*1101 |
| | DRB1*1302 |
| | DRB1*1501 |
| | DRB3*0101 |
| | DRB4*0101 |
| | DRB5*0101 |

TABLE 4
Panel of 822 peptides predicted from 93 novel Timothy Grass (TG)
proteins tested for T cell recognition in TG allergic patients.

| | | | | Total | | Total | |
|---|---|---|---|---|---|---|---|
| | | | | response | | response | |
| | | Antibody reactvity | SEQ ID NOS: 1443-2264 | IL-5 | | IFNg | |
| Antigen | Peptide | IgE/IgG | Sequence | Events | SFC | Events | SFC |
| 1 | 1₁₂ | E+G+ | SDGTFARAAVPSGAS | 0 | — | 0 | — |
| | 1₁₈ | E+G+ | RAAVPSGASTGVYEA | 0 | — | 0 | — |
| | 1₂₄ | E+G+ | GASTGVYEALELRDG | 0 | — | 0 | — |
| | 1₄₃ | E+G+ | LGKGVLKGNRANVEL | 0 | — | 0 | — |
| | 1₅₁ | E+G+ | NRANVELFHIAVLLA | 0 | — | 0 | — |
| | 1₇₀ | E+G+ | QTELDNFMVHQLDGT | 0 | — | 0 | — |
| | 1₉₁ | E+G+ | CKQKVFFNISADADA | 0 | — | 0 | — |
| | 1₁₅ | E+G+ | PAMAATIQSVKARQI | 0 | — | 0 | — |
| | 1₈₄ | E+G+ | VDNVNSIIGPALIGK | 0 | — | 0 | — |
| | 1₁₂₇ | E+G+ | KLGANAILAVSLAVC | 0 | — | 0 | — |
| | 1₁₄₈ | E+G+ | KKIPLYQHIANLAGN | 0 | — | 0 | — |
| | 1₁₆₁ | E+G+ | GNKQLVLPVPAFNVI | 0 | — | 1 | 190 |
| | 1₁₈₄ | E+G+ | KLAMQEFMILPTGAS | 0 | — | 0 | — |
| | 1₂₀₅ | E+G+ | KMGVEVYHNLKSVIK | 0 | — | 0 | — |
| | 1₂₆₀ | E+G+ | GKVVIGMDVAASEFY | 0 | — | 0 | — |
| | 1₃₀₄ | E+G+ | VYKSFVSEYPIVSIE | 1 | 40 | 0 | — |
| | 1₃₄₂ | E+G+ | IVGDDLLVTNPTRVA | 0 | 0 | 1 | 193 |
| | 1₃₆₅ | E+G+ | NALLLKVNQIGSVTE | 1 | 40 | 1 | 170 |
| | 1₄₀₂ | E+G+ | ETEDTFIADLAVGLS | 0 | — | 0 | — |
| | 1₄₂₉ | E+G+ | ERLAKYNQLLRIEEE | 0 | — | 0 | — |
| | 1₄₄₄ | E+G+ | LGAAAVYAGLKFRAP | 0 | — | 1 | 153 |
| 2 | 2₁ | E+G+ | AEFEGVFLDFARQQA | 2 | 58 | 0 | — |
| | 2₂₀ | E+G+ | VDKLFKLAEAAKLKE | 2 | 88 | 2 | 247 |
| | 2₄₉ | E+G+ | ENRSVLHVALRAPRD | 2 | 63 | 1 | 27 |
| | 2₁₁₆ | E+G+ | FLGPLFVHTALQTDP | 1 | 63 | 0 | — |
| | 2₁₃₉ | E+G+ | RQLRFLANVDPVDVA | 1 | 20 | 1 | 20 |
| | 2₁₆₈ | E+G+ | VVSKTFTTAETMLNA | 0 | — | 1 | 97 |
| | 2₁₈₅ | E+G+ | IKEWIVSSLGPQAVS | 0 | — | 0 | — |
| | 2₁₉₈ | E+G+ | VSKHMIAVSTNLKLV | 2 | 80 | 1 | 20 |
| | 2₂₃₂ | E+G+ | RYSVCSAVGVLPLSL | 3 | 83 | 3 | 238 |
| | 2₂₃₈ | E+G+ | AVGVLPLSLQYGFPI | 3 | 71 | 4 | 121 |
| | 2₂₄₄ | E+G+ | LSLQYGFPIVQRFLE | 1 | 127 | 1 | 50 |
| | 2₂₅₀ | E+G+ | FPIVQRFLEGASSID | 2 | 92 | 1 | 90 |
| | 2₂₆₆ | E+G+ | HFRTASFEKNIPVLL | 1 | 33 | 0 | — |
| | 2₂₇₈ | E+G+ | VLLGLLSVWNVSFLG | 2 | 50 | 0 | — |
| | 2₂₈₄ | E+G+ | SVWNVSFLGYPARAI | 1 | 100 | 1 | 53 |
| | 2₂₉₅ | E+G+ | ARAILPYSQALEKLA | 1 | 120 | 1 | 27 |
| | 2₃₄₆ | E+G+ | NGQHSFYQLIHQGRV | 1 | 27 | 2 | 95 |
| | 2₃₆₃ | E+G+ | CDFIGVIKSQQPVYL | 2 | 98 | 2 | 238 |
| | 2₃₈₇ | E+G+ | ELMSNFFAQPDALAY | 2 | 102 | 3 | 99 |
| | 2₄₂₁ | E+G+ | KTFKGNRPSLSFLLS | 2 | 42 | 5 | 363 |
| | 2₄₂₈ | E+G+ | PSLSFLLSSLSAYEI | 1 | 67 | 1 | 53 |
| | 2₄₃₉ | E+G+ | AYEIGQLLAIYEHRI | 1 | 40 | 0 | — |
| | 2₄₄₅ | E+G+ | LLAIYEHRIAVQGFI | 1 | 77 | 2 | 42 |
| | 2₄₅₆ | E+G+ | QGFIWGINSFDQWGV | 1 | 113 | 0 | — |
| | 2₄₉₃ | E+G+ | PVEGFNPSSASLLAR | 1 | 143 | 1 | 47 |
| | 2₄₉₉ | E+G+ | PSSASLLARYLAVEP | 1 | 127 | 0 | — |
| 3 | 3₆ | E+G+ | ILLVFAETAEPEVKV | 0 | — | 0 | — |
| | 3₁₅ | E+G+ | EPEVKVVDLTILSPD | 0 | — | 0 | — |
| | 3₅₀ | E+G+ | LKDGSTYSFRFSFIV | 1 | 20 | 0 | — |
| | 3₅₇ | E+G+ | SFRFSFIVSNNIVSG | 0 | — | 0 | — |
| | 3₁₃₀ | E+G+ | DDGKVYLEMSYYFEI | 0 | — | 0 | — |
| 4 | 4₆ | E+G+ | MKTIFDFESIKKLLA | 0 | — | 1 | 43 |
| | 4₁₂ | E+G+ | FESIKKLLASPKFSF | 1 | 47 | 2 | 245 |
| | 4₄₁ | E+G+ | RMFVDELGASESSLL | 1 | 47 | 1 | 30 |
| | 4₇₀ | E+G+ | PNLTYAKELVERMGL | 0 | — | 1 | 33 |
| | 4₁₀₆ | E+G+ | RNMVLGKRFFVTPSD | 1 | 33 | 1 | 27 |
| | 4₁₁₂ | E+G+ | KRFFVTPSDSVAIIA | 0 | — | 0 | — |
| | 4₁₁₉ | E+G+ | SDSVAIIAANAVQSI | 0 | — | 0 | — |
| | 4₁₂₉ | E+G+ | AVQSIPYFASGLKGV | 0 | — | 1 | 37 |
| | 4₁₅₈ | E+G+ | KNLNLKFFEVPTGWK | 0 | — | 0 | — |
| | 4₂₀₃ | E+G+ | GIWAVLAWLSIIAYK | 0 | — | 1 | 107 |
| | 4₂₂₁ | E+G+ | NLGGDKLVSVEDIVL | 0 | — | 0 | — |
| | 4₂₂₇ | E+G+ | LVSVEDIVLQHWATY | 0 | — | 0 | — |
| | 4₂₆₀ | E+G+ | KELMANLVKMQSALS | 1 | 327 | 1 | 97 |
| | 4₂₆₆ | E+G+ | LVKMQSALSDVNKLI | 2 | 35 | 0 | — |
| | 4₃₀₉ | E+G+ | HQGIRYLFGDGSRLV | 0 | — | 0 | — |
| | 4₃₂₀ | E+G+ | SRLVFRLSGTGSVGA | 0 | — | 0 | — |
| | 4₃₃₃ | E+G+ | GATIRIYIEQYEKDS | 0 | — | 0 | — |
| | 4₃₅₆ | E+G+ | DALSPLVDVALKLSK | 0 | — | 0 | — |
| 5 | 5₂₇ | E+G+ | TVSDEYLAAVAKARR | 0 | — | 1 | 73 |
| | 5₉₄ | E+G+ | LDIAVRLLEPIKEQV | 0 | — | 0 | — |
| | 5₁₀₄ | E+G+ | IKEQVPILSYADFYQ | 0 | — | 0 | — |
| | 5₁₁₀ | E+G+ | ILSYADFYQLAGVVA | 0 | — | 0 | — |
| | 5₁₁₆ | E+G+ | FYQLAGVVAVEITGG | 0 | — | 0 | — |
| | 5₁₅₉ | E+G+ | DHLRQVFTAQMGLSD | 0 | — | 0 | — |
| | 5₂₀₂ | E+G+ | NPLIFDNSYFTELLT | 0 | — | 0 | — |
| | 5₂₄₈ | E+G+ | EDAFFADYAEAHLKL | 0 | — | 0 | — |
| 6 | 6₁ | E+G+ | TLLFPHTQISLPSVR | 2 | 32 | 0 | — |
| | 6₁₄ | E+G+ | VRTRKHLAATMADEK | 0 | — | 0 | — |
| | 6₄₄ | E+G+ | DNEKSGFISLVSRYL | 2 | 38 | 0 | — |
| | 6₅₀ | E+G+ | FISLVSRYLSGEEEH | 0 | — | 0 | — |
| | 6₉₂ | E+G+ | EATKALLNKLAVLKL | 1 | 33 | 0 | — |
| | 6₁₂₃ | E+G+ | IEVRNGFTFLDLIVL | 1 | 27 | 0 | — |
| | 6₁₃₁ | E+G+ | FLDLIVLQIESLNKK | 1 | 33 | 0 | — |
| | 6₁₄₂ | E+G+ | LNKKYGSNVPLLLMN | 1 | 353 | 0 | — |
| | 6₁₄₉ | E+G+ | NVPLLLMNSFNTHED | 1 | 153 | 0 | — |
| | 6₁₆₅ | E+G+ | LKIVEKYANSSIDIH | 3 | 196 | 3 | 654 |
| | 6₁₇₅ | E+G+ | SIDIHTFNQSQYPRV | 2 | 113 | 1 | 243 |
| | 6₂₂₄ | E+G+ | GKLDLLLSQGKEYVF | 1 | 87 | 2 | 65 |
| | 6₂₃₃ | E+G+ | GKEYVFIANSDNLGA | 2 | 115 | 0 | — |
| | 6₂₄₂ | E+G+ | SDNLGAIVDMKILNH | 2 | 28 | 1 | 30 |
| | 6₂₄₈ | E+G+ | IVDMKILNHLIHKQN | 3 | 101 | 2 | 160 |
| | 6₂₈₂ | E+G+ | ISYEGRVQLLEIAQV | 0 | — | 0 | — |
| | 6₂₈₈ | E+G+ | VQLLEIAQVPDAHVD | 1 | 73 | 0 | — |
| | 6₃₀₄ | E+G+ | FKSIEKFKIFNTNNL | 1 | 30 | 1 | 357 |
| | 6₃₁₀ | E+G+ | FKIFNTNNLWVNLKA | 2 | 60 | 0 | — |
| | 6₃₁₆ | E+G+ | NNLWVNLKAIKRLVE | 3 | 517 | 2 | 823 |
| | 6₃₂₅ | E+G+ | IKRLVEADALKMEII | 2 | 103 | 1 | 397 |
| | 6₃₄₈ | E+G+ | VKVLQLETAAGAAIR | 3 | 60 | 1 | 50 |
| | 6₃₅₉ | E+G+ | AAIRFFDHAIGINVP | 4 | 105 | 4 | 344 |
| | 6₃₆₉ | E+G+ | GINVPRSRFLPVKAT | 1 | 23 | 0 | — |
| | 6₃₇₆ | E+G+ | RFLPVKATSDLQLVQ | 2 | 60 | 1 | 83 |
| | 6₃₈₃ | E+G+ | TSDLQLVQSDLYTLV | 1 | 40 | 1 | 87 |
| | 6₃₈₉ | E+G+ | VQSDLYTLVDGFVTR | 2 | 82 | 1 | 60 |
| | 6₄₁₈ | E+G+ | GPEFKKVGSFLGRFK | 2 | 182 | 2 | 147 |
| | 6₄₂₉ | E+G+ | GRFKSIPSIVELDSL | 3 | 247 | 0 | — |
| 7 | 7₃₁ | E+G+ | GTIRNIINGTVFREP | 3 | 109 | 2 | 523 |
| | 7₁₀₁ | E+G+ | VFNFTGAGGVALAMY | 3 | 118 | 3 | 968 |
| | 7₁₂₁ | E+G+ | IQGFAEASMAIAYEK | 2 | 33 | 1 | 50 |
| | 7₁₂₇ | E+G+ | ASMAIAYEKKWPLYL | 2 | 52 | 1 | 80 |
| | 7₁₃₄ | E+G+ | EKKWPLYLSTKNTIL | 1 | 63 | 1 | 117 |
| | 7₁₅₃ | E+G+ | GRFKDIFQAVYEADW | 1 | 57 | 2 | 63 |
| | 7₁₇₇ | E+G+ | WYEHRLIDDMVAYAL | 1 | 43 | 0 | — |
| | 7₂₀₈ | E+G+ | VQSDFLAQGFGSLGL | 2 | 35 | 1 | 80 |
| | 7₂₆₀ | E+G+ | NSIASIFAWTRGLAH | 0 | — | 1 | 63 |
| | 7₂₈₀ | E+G+ | DNARLLDFTQKLEDA | 2 | 37 | 0 | — |
| | 7₃₀₄ | E+G+ | MTKDLALLVHGSSKV | 1 | 40 | 2 | 128 |
| | 7₃₂₄ | E+G+ | LNTEEFIDAVAAELQ | 3 | 60 | 3 | 92 |
| 8 | 8₁ | E+G+ | ALTHTTIVASGIENM | 0 | — | 0 | — |
| | 8₃ | E+G+ | TIVASGIENMKIFTR | 0 | — | 1 | 293 |
| | 8₁₅ | E+G+ | MKIFTRTWVLLLLVV | 0 | — | 0 | — |
| | 8₂₄ | E+G+ | LLLLVVLLFEGCLAK | 0 | — | 0 | — |
| | 8₁₁₀ | E+G+ | KDTHYTLSAWLQLSK | 0 | — | 0 | — |
| | 8₁₆₆ | E+G+ | GKGELFFETNVTAEL | 0 | — | 0 | — |
| | 8₁₇₆ | E+G+ | VTAELMVDSMSLQPF | 0 | — | 0 | — |
| | 8₂₅₃ | E+G+ | YEKWFTSRFTVATME | 0 | — | 0 | — |
| | 8₃₁₃ | E+G+ | KQMDWVSKLSAPQLK | 0 | — | 0 | — |
| | 8₃₈₂ | E+G+ | KPILFMNEYNTIEEP | 0 | — | 0 | — |
| | 8₄₀₄ | E+G+ | TKYLAKLKQIQSYPG | 0 | — | 0 | — |
| | 8₄₃₈ | E+G+ | PYVRGSLDTLAQAKV | 0 | — | 0 | — |
| | 8₄₆₅ | E+G+ | PKQVEYLEEVMREGF | 0 | — | 0 | — |
| | 8₁₇₂ | E+G+ | NVTAELVDSMSLQPF | 0 | — | 0 | — |
| 9 | 9₅₆ | E+G+ | TDTIVYCAGRTFFFR | 0 | — | 1 | 180 |
| | 9₆₄ | E+G+ | GRTFFFRRLDAPLDA | 0 | — | 1 | 383 |
| | 9₁₅₂ | E+G+ | KSLVRAFMWDSGSTV | 0 | — | 0 | — |
| | 9₁₇₅ | E+G+ | RVLSCDFKPTRPFRI | 0 | — | 1 | 97 |
| | 9₂₆₀ | E+G+ | HTGSIYAVSWSADSK | 0 | — | 0 | — |
| | 9₃₄₉ | E+G+ | AGHLKTVSSLTYFPQ | 0 | — | 0 | — |
| | 9₃₅₅ | E+G+ | VSSLTYFPQSNPRTM | 1 | 23 | 0 | — |
| | 9₃₇₃ | E+G+ | SYDGVIIRWIQGVGY | 0 | — | 0 | — |
| | 9₃₉₇ | E+G+ | TQIKCFVAAEEELIT | 1 | 20 | 0 | — |
| | 9₄₄₁ | E+G+ | NALNIAVQQPEFALI | 1 | 60 | 0 | — |
| | 9₄₅₀ | E+G+ | PEFALITTDSAIVLL | 1 | 33 | 0 | — |
| | 9₄₅₇ | E+G+ | TDSAIVLLHKSTVTS | 0 | — | 0 | — |
| | 9₄₇₃ | E+G+ | TKVSYTITSSAVSPD | 0 | — | 0 | — |
| | 9₄₉₉ | E+G+ | KLRIYSISGDTLTEE | 0 | — | 1 | 53 |
| | 9₅₂₆ | E+G+ | IHYSPDVSMFASADA | 1 | 30 | 0 | — |
| | 9₅₅₄ | E+G+ | IKLKNMLFHTARINC | 1 | 33 | 1 | 20 |
| 10 | 10₁₀ | E+G+ | GRYFSKDAVQIITKM | 1 | 43 | 1 | 170 |
| | 10₁₆ | E+G+ | DAVQIITKMAAANGV | 1 | 160 | 1 | 83 |
| | 10₂₉ | E+G+ | GVRRVWVGQDSLLST | 0 | — | 2 | 30 |
| | 10₃₉ | E+G+ | SLLSTPAVSAIIRER | 1 | 37 | 2 | 30 |
| | 10₄₅ | E+G+ | AVSAIIRERIAADGS | 1 | 60 | 1 | 47 |
| 11 | 11₅₈ | E+G+ | SVGFVETLENDLAQL | 1 | 30 | 1 | 47 |
| | 11₁₁₁ | E+G+ | LGEAPYKFKSALEAV | 1 | 53 | 2 | 488 |
| | 11₁₁₇ | E+G+ | KFKSALEAVKTLRAE | 1 | 43 | 1 | 73 |
| | 11₁₃₇ | E+G+ | QYLPAFVIVDESGKS | 1 | 23 | 0 | — |
| | 11₁₆₁ | E+G+ | VVTFNFRADRMVMLA | 2 | 50 | 0 | — |
| | 11₁₆₈ | E+G+ | ADRMVMLAKALEFAD | 1 | 40 | 0 | — |
| | 11₁₈₃ | E+G+ | FDKFDRVRVPKIKYA | 0 | — | 0 | — |
| | 11₁₉₂ | E+G+ | PKIKYAGMLQYDGEL | 0 | — | 0 | — |
| | 11₂₀₆ | E+G+ | LKLPNKFLVSPPLIE | 1 | 30 | 0 | — |
| 12 | 12₅ | E+G+ | YKLLCSSFPVITYHQ | 2 | 60 | 0 | — |
| | 12₁₂ | E+G+ | FPVITYHQGRNGNLS | 1 | 103 | 0 | — |
| | 12₂₁ | E+G+ | RNGNLSALACPLNQK | 1 | 20 | 0 | — |
| 13 | 13₂₁ | E+G+ | ECILSGLLSVDGLKV | 0 | — | 0 | — |
| | 13₂₇ | E+G+ | LLSVDGLKVLHMDRN | 0 | — | 0 | — |
| | 13₈₁ | E+G+ | VPKFMMANGALVRVL | 0 | — | 0 | — |
| | 13₉₂ | E+G+ | VRVLIRTSVTKYLNF | 0 | — | 0 | — |
| | 13₁₀₁ | E+G+ | TKYLNFKAVDGSFVY | 0 | — | 0 | — |
| | 13₁₂₆ | E+G+ | TDVEALKSNLMGLFE | 0 | — | 0 | — |
| | 13₁₄₀ | E+G+ | EKRRARKFFIYVQDY | 0 | — | 0 | — |
| | 13₁₄₆ | E+G+ | KFFIYVQDYEEEDPK | 0 | — | 0 | — |
| | 13₁₈₅ | E+G+ | TVDFIGHALALHRDD | 0 | — | 0 | — |
| | 13₂₁₀ | E+G+ | VKRMKLYAESLARFQ | 0 | — | 0 | — |
| | 13₂₃₇ | E+G+ | GELPQAFARLSAVYG | 0 | — | 0 | — |
| | 13₂₄₃ | E+G+ | FARLSAVYGGTYMLN | 0 | — | 0 | — |
| | 13₃₅₂ | E+G+ | KGKFIAFVSTEAETD | 0 | — | 0 | — |
| | 13₄₁₇ | E+G+ | ETTVKDVLALYSKIT | 0 | — | 0 | — |
| | 13₄₃₅ | E+G+ | LDLSVDLNAASAGES | 0 | — | 0 | — |
| 14 | 14₁ | E+G+ | LLGYLLWVVAIRRPR | 1 | 110 | 0 | — |
| | 14₇ | E+G+ | WVVAIRRPRPVRCFS | 0 | — | 0 | — |
| 15 | 15₁ | E+G+ | PRVNFFKRYNLTCVF | 0 | — | 0 | — |
| | 15₇ | E+G+ | KRYNLTCVFWSKKKK | 0 | — | 0 | — |
| 16 | 16₃ | E−G− | DEKLLSVFREGVVYG | 0 | — | 1 | 113 |
| | 16₂₁ | E−G− | GPGVYDIHSPRIPSK | 0 | — | 2 | 80 |
| | 16₃₆ | E−G− | EEIADDFALFRGTRP | 0 | — | 2 | 207 |
| | 16₄₂ | E−G− | FALFRGTRPPRRPKK | 0 | — | 1 | 97 |
| | 16₆₈ | E−G− | LCPGFCLADVTPETY | 0 | — | 2 | 45 |
| 17 | 17₂ | E+G+ | VCTRLSPFCCLYCIL | 2 | 52 | 0 | — |
| | 17₁₃ | E+G+ | YCILCCWYSMRLVTV | 1 | 63 | 0 | — |
| 18 | 18₁ | E+G− | NIPATWGAMEKLYDA | 0 | — | 0 | — |
| | 18₇ | E+G− | GAMEKLYDAGKARAI | 0 | — | 0 | — |
| | 18₁₇ | E+G− | KARAIGVSNLASKKL | 0 | — | 0 | — |
| | 18₂₃ | E+G− | VSNLASKKLGDLLAV | 0 | — | 0 | — |
| | 18₂₉ | E+G− | KKLGDLLAVARIPPA | 0 | — | 0 | — |
| 19 | 19₂₆ | E+G− | LNGPFIATVQQRGAA | 0 | — | 0 | — |
| | 19₃₅ | E+G− | QQRGAAIIKARKLSS | 0 | — | 0 | — |
| | 19₄₁ | E+G− | IIKARKLSSALSAAS | 0 | — | 0 | — |
| | 19₄₇ | E+G− | LSSALSAASSACDHI | 0 | — | 0 | — |
| | 19₆₇ | E+G− | GTPEGTFVSMGVYSD | 0 | — | 0 | — |
| 20 | 20₂₅ | E+G− | PPPGQHIAMAASSRR | 0 | — | 0 | — |
| | 20₄₀ | E+G− | ASQLLGSAASRFLHS | 0 | — | 0 | — |
| | 20₄₉ | E+G− | SRFLHSRGYAAAAAA | 0 | — | 0 | — |
| | 20₅₅ | E+G− | RGYAAAAAAPSPAVF | 0 | — | 0 | — |
| | 20₁₁₄ | E+G− | LGLPVFNSVAEAKAE | 0 | — | 0 | — |
| | 20₁₂₉ | E+G− | TKANASVIYVPPPFA | 0 | — | 0 | — |
| | 20₁₃₅ | E+G− | VIYVPPPFAAAAIME | 0 | — | 0 | — |
| | 20₁₄₁ | E+G− | PFAAAAIMEALEAEL | 0 | — | 0 | — |
| | 20₁₆₇ | E+G− | QHDMVKVKAALNRQS | 0 | — | 0 | — |
| | 20₂₂₂ | E+G− | TLTYEAVFQTTAVGL | 0 | — | 0 | — |
| | 20₂₉₄ | E+G− | DKPVVAFIAGLTAPP | 1 | 23 | 0 | — |
| | 20₃₂₉ | E+G− | KIKALREAGVTVVES | 1 | 23 | 0 | — |
| | 20₃₄₈ | E+G− | GSTMFEIFKQRGMVE | 0 | — | 0 | — |
| 21 | 21₂ | E+G− | GSGDFKTIKEALAKV | 0 | — | 0 | — |
| | 21₂₃ | E+G− | MYVMYIKEGTYKEYV | 0 | — | 0 | — |
| | 21₃₃ | E+G− | YKEYVTVPRTVTNLV | 0 | — | 0 | — |
| | 21₄₃ | E+G− | VTNLVMIGDGAAKTI | 0 | — | 0 | — |
| | 21₆₃ | E+G− | NFKMNLTSMVAVSLV | 0 | — | 0 | — |
| | 21₁₀₉ | E+G− | YQDTLYTHAQRQFFR | 0 | — | 0 | — |
| | 21₁₂₉ | E+G− | GTIDFIFGNSQVVIQ | 0 | — | 0 | — |
| | 21₅₃ | E+G− | AKTIILKFLLPVMIV | 0 | — | 0 | — |
| 22 | 22₁₅ | E+G− | NTRVLLLRRTSPFSA | 1 | — | 0 | — |
| | 22₁₂₄ | E+G− | DGYYIHGQCAIIMFD | 1 | — | 0 | — |
| | 22₁₃₁ | E+G− | QCAIIMFDVTSRLTY | 1 | 27 | 0 | — |
| | 22₁₈₇ | E+G− | RKKNLQYYEISAKSN | 0 | — | 0 | — |
| | 22₁₉₇ | E+G− | SAKSNYNFEKPFLYL | 0 | — | 0 | — |
| | 22₂₀₆ | E+G− | KPFLYLARKLAGDAN | 2 | 88 | 1 | 603 |
| | 22₂₁₉ | E+G− | ANIHFVEAVALKPPE | 0 | — | 1 | 63 |
| | 22₂₄₅ | E+G− | EAELAAAAAQPLPDD | 1 | 20 | 0 | — |
| 23 | 23₁ | E+G− | RTSSWGSGASLKIDR | 1 | 27 | 0 | — |
| | 23₁₀ | E+G− | SLKIDRRELVTTRIY | 2 | 35 | 0 | — |
| 24 | 24₂₁ | E+G− | RFLHAAVAMATKRSV | 0 | — | 1 | 150 |
| | 24₄₄ | E+G− | KGKKVFLRADLNVPL | 1 | 30 | 3 | 234 |
| | 24₆₈ | E+G− | TRIRASIPTIKFLLE | 0 | — | 0 | — |
| | 24₇₆ | E+G− | TIKFLLEKGAKVILA | 2 | 47 | 0 | — |
| | 24₈₂ | E+G− | EKGAKVILASHLGRP | 1 | 63 | 0 | — |
| | 24₁₀₉ | E+G− | VPRLSELLGVEVVMA | 2 | 70 | 2 | 118 |
| | 24₁₄₁ | E+G− | GGVLLLENVRFYKEE | 2 | 45 | 1 | 23 |
| | 24₁₆₀ | E+G− | PEFAKKLASVADLYV | 2 | 45 | 0 | — |
| | 24₁₉₃ | E+G− | KFLRPSVAGFLMQKE | 3 | 38 | 1 | 177 |
| | 24₁₉₉ | E+G− | VAGFLMQKELDYLVG | 1 | 90 | 0 | — |
| | 24₂₀₆ | E+G− | KELDYLVGAVANPKK | 1 | 37 | 1 | 143 |
| | 24₂₃₄ | E+G− | KIGVIESLLAKVDIL | 1 | 57 | 0 | — |
| | 24₂₅₃ | E+G− | GMIFTFYKAQGKAVG | 0 | — | 2 | 397 |
| | 24₂₇₂ | E+G− | EEDKLELATSLIETA | 2 | 52 | 1 | 23 |
| | 24₂₉₀ | E+G− | GVSLLLPTDVVVADK | 1 | 90 | 0 | — |
| 25 | 25₂ | E+G− | SAPALRILRSFPSHS | 1 | 97 | 1 | 143 |
| 26 | 26₂ | E+G− | VELVAVNDPFITTDY | 0 | — | 0 | — |
| | 26₁₅ | E+G− | DYMTYMFKYDTVHGQ | 0 | — | 0 | — |
| | 26₉₀ | E+G− | GGAKKVIISAPSKDA | 0 | — | 0 | — |
| | 26₁₁₆ | E+G− | YTSDITIVSNASCTT | 0 | — | 0 | — |
| | 26₁₃₈ | E+G− | KVINDRFGIVEGLMT | 0 | — | 1 | 37 |
| | 26₁₄₄ | E+G− | FGIVEGLMTTVHAMT | 0 | — | 0 | — |
| | 26₁₇₄ | E+G− | GGRAASFNIIPSSTG | 0 | — | 0 | — |
| | 26₂₂₁ | E+G− | LTVRLEKAATYEQIK | 0 | — | 0 | — |
| | 26₂₇₈ | E+G− | ALNDNFVKLVSWYDN | 0 | — | 0 | — |
| 27 | 27₄₆ | E+G− | IGKRFASINVENVED | 0 | — | 0 | — |
| | 27₆₄ | E+G− | ALRELLFTTPGALQH | 0 | — | 0 | — |
| | 27₇₆ | E+G− | LQHISGVILFEETLY | 1 | 53 | 0 | — |
| | 27₁₄₄ | E+G− | YEAGARFAKWRAVLK | 1 | 33 | 0 | — |
| | 27₁₇₅ | E+G− | GLARYAIICQENGLV | 2 | 33 | 1 | 140 |
| | 27₂₀₆ | E+G− | RCAYVTEVVLAACYK | 1 | 27 | 0 | — |
| | 27₂₂₃ | E+G− | NDQHVLLEGSLLKPN | 1 | 27 | 0 | — |
| | 27₃₀₀ | E+G− | WFLSFSFGRALQQST | 1 | 23 | 0 | — |
| 28 | 28₂ | E+G− | IPPAPHLKRWNRVVD | 1 | 127 | 0 | — |
| | 28₈ | E+G− | LKRWNRVVDTNLESP | 0 | — | 0 | — |
| | 28₁₄ | E+G− | VVDTNLESPNDIVPE | 0 | — | 0 | — |
| | 28₂₈ | E+G− | GAPFTGSGYRIAPYS | 1 | 107 | 0 | — |
| | 28₃₆ | E+G− | GYRIAPYSSILLKAT | 1 | — | 2 | 477 |
| 29 | 29₂ | E+G− | SFRFFLAHSSIHPST | 2 | 83 | 0 | — |
| | 29₂₆ | E+G− | EKHFKYVILGGGVAA | 0 | — | 0 | — |
| | 29₁₀₆ | E+G− | TEKGIELILSTEIVK | 1 | 50 | 1 | 247 |
| | 29₁₂₄ | E+G− | ASKTLTSAAGATFTY | 1 | 30 | 0 | — |
| | 29₁₃₆ | E+G− | FTYETLLIATGSSTI | 0 | — | 0 | — |
| | 29₁₉₃ | E+G− | GGGYIGLELSAALKL | 0 | — | 0 | — |
| | 29₁₉₉ | E+G− | LELSAALKLNNFDVT | 1 | 133 | 0 | — |
| | 29₂₀₅ | E+G− | LKLNNFDVTMVYPEP | 0 | — | 0 | — |
| | 29₂₂₂ | E+G− | MPRLFTAGIAHFYEG | 0 | — | 0 | — |
| | 29₂₃₂ | E+G− | HFYEGYYASKGINIV | 0 | — | 0 | — |
| | 29₂₄₀ | E+G− | SKGINIVKGTVASGF | 0 | — | 0 | — |
| | 29₂₇₄ | E+G− | DANIVIVGVGGRPLT | 0 | — | 0 | — |
| | 29₃₀₃ | E+G− | KTDTFFETSVAGVYA | 0 | — | 0 | — |
| | 29₃₁₅ | E+G− | VYAIGDVASFPMKLY | 0 | — | 0 | — |
| | 29₃₆₅ | E+G− | DYLPYFYSRSFDIAW | 0 | — | 0 | — |
| 30 | 30₂₂ | E+G− | EQFVTPWSFSVASGH | 0 | — | 0 | — |
| | 30₅₅ | E+G− | RDAHYLRGLLPPAIV | 0 | — | 0 | — |
| | 30₇₉ | E+G− | MHNLRQYTVPLQRYI | 0 | — | 0 | — |
| | 30₈₇ | E+G− | VPLQRYIAMMDLQER | 0 | — | 0 | — |
| | 30₁₀₃ | E+G− | ERLFYKLLIDNVEEL | 0 | — | 0 | — |
| | 30₁₁₅ | E+G− | EELLPVVYTPVVGEA | 0 | — | 0 | — |
| | 30₁₆₃ | E+G− | RSIQVIVVTDGERIL | 0 | — | 0 | — |
| | 30₂₃₉ | E+G− | EEYHELLQEFMNAVK | 0 | — | 0 | — |
| | 30₂₅₇ | E+G− | GEKVLVQFEDFANHN | 0 | — | 0 | — |
| | 30₂₇₃ | E+G− | FDLLAKYSKSHLVFN | 0 | — | 0 | — |
| | 30₂₈₅ | E+G− | VFNDDIQGTASVVLA | 1 | 67 | 0 | — |
| | 30₂₉₅ | E+G− | SVVLAGLLAALKVIG | 0 | — | 0 | — |
| | 30₃₁₁ | E+G− | GLADQTYLFLGAGEA | 0 | — | 0 | — |
| | 30₃₂₇ | E+G− | TGIAELIALEMSKHT | 0 | — | 0 | — |
| | 30₃₄₈ | E+G− | CRKKIWLVDSKGLLV | 0 | — | 0 | — |
| | 30₃₈₀ | E+G− | HEPLTTLLEAVQSLK | 0 | — | 0 | — |
| | 30₃₈₆ | E+G− | LLEAVQSLKPTVLIG | 0 | — | 0 | — |
| | 30₄₂₀ | E+G− | NEKPVIFSLSNPTSH | 0 | — | 0 | — |
| | 30₄₄₀ | E+G− | EEAYTWTKGTAVFAS | 0 | — | 0 | — |
| | 30₄₈₁ | E+G− | GFGLGVVISGAIRVH | 0 | — | 0 | — |
| | 30₄₈₇ | E+G− | VISGAIRVHDDMLLA | 0 | — | 0 | — |
| | 30₄₉₅ | E+G− | HDDMLLAASEALAEQ | 0 | — | 0 | — |
| | 30₅₂₁ | E+G− | FPPFTNIRKISANIA | 0 | — | 0 | — |
| | 30₅₂₇ | E+G− | IRKISANIAAKVAAK | 0 | — | 0 | — |
| 31 | 31₆ | E−G+ | QIIRKGFYLTKNVEH | 0 | — | 0 | — |
| | 31₁₂ | E−G+ | FYLTKNVEHKGQVDL | 0 | — | 0 | — |
| | 31₁₈ | E−G+ | VEHKGQVDLVTETDK | 0 | — | 0 | — |
| | 31₃₀ | E−G+ | TDKACEDLIFNHLRK | 0 | — | 0 | — |
| | 31₃₆ | E−G+ | DLIFNHLRKLYPDHK | 0 | — | 0 | — |
| 32 | 32₄₁ | E−G+ | IEIDSLFEGIDFYST | 0 | — | 1 | 27 |
| | 32₅₀ | E−G+ | IDFYSTITRARFEEL | 1 | 20 | 0 | — |
| | 32₁₀₂ | E−G+ | IPKVQQLLQDFFNGK | 0 | — | 0 | — |
| | 32₁₂₆ | E−G+ | EAVAYGAAVQAAILS | 0 | — | 1 | 30 |
| | 32₁₄₇ | E−G+ | VQDLLLLDVTPLSLG | 0 | — | 1 | 47 |
| 33 | 33₁ | E−G+ | QEMAYWSLKAAIEIG | 0 | — | 0 | — |
| | 33₂₀ | E−G+ | DAASSLYLFGENLPR | 0 | — | 0 | — |
| | 33₆₀ | E−G+ | GYNISLASMIPDYDT | 0 | — | 0 | — |
| | 33₇₂ | E−G+ | YDTVITNVRRSLAVA | 0 | — | 0 | — |
| | 33₁₁₆ | E−G+ | LEKIVAILSAFVDAA | 0 | — | 0 | — |
| | 33₇ | E−G+ | NVRRSLAVAKKNHLA | 0 | — | 0 | — |
| | 33₁₄ | E−G+ | VAKKNHLAWNCERCR | 0 | — | 0 | — |
| | 33₂₀ | E−G+ | LAWNCERCRKGESKK | 0 | — | 0 | — |
| | 33₃₃ | E−G+ | KKTVDAILSAFVDAA | 0 | — | 0 | — |
| 34 | 34₁ | E−G+ | LMSFSWICACVRAAA | 0 | — | 0 | — |
| | 34₇ | E−G+ | ICACVRAAAVAWEAG | 0 | — | 0 | — |
| | 34₃₉ | E−G+ | VRVKILFTALCHTDV | 0 | — | 0 | — |
| | 34₁₁₄ | E−G+ | MCDLLRINTDRGVMI | 0 | — | 0 | — |
| | 34₁₄₀ | E−G+ | KPIFHFVGTSTFSEY | 1 | 40 | 0 | — |
| | 34₁₄₆ | E−G+ | VGTSTFSEYTVMHVG | 0 | — | 0 | — |
| | 34₂₀₀ | E−G+ | VAIFGLGAVGLAAAE | 0 | — | 0 | — |
| | 34₂₀₆ | E−G+ | GAVGLAAAEGARIAG | 0 | — | 0 | — |
| | 34₂₇₅ | E−G+ | GNINAMIQAFECVHD | 0 | — | 0 | — |
| | 34₃₁₉ | E−G+ | LKGTFFGNFKPRTDL | 0 | — | 0 | — |
| | 34₃₄₉ | E−G+ | KFITHSVTFSEINKA | 1 | 50 | 1 | 103 |
| | 34₃₅₅ | E−G+ | VTFSEINKAFDLMAK | 0 | — | 1 | 103 |
| 35 | 35₁ | E−G+ | ALRWNLQMGHSVLPK | 1 | 47 | 0 | — |
| | 35₂₅ | E−G+ | NLDVYDWSIPDDLLA | 1 | 90 | 1 | 67 |
| | 35₃₅ | E−G+ | DDLLAKFSEIKQTRL | 1 | 30 | 0 | — |
| | 35₄₁ | E−G+ | FSEIKQTRLLMGNFI | 0 | — | 0 | — |
| | 35₄₇ | E−G+ | TRLLMGNFIVNKDSV | 0 | — | 0 | — |
| 36 | 36₁ | E−G+ | QDFKKVNEIYAKYFP | 0 | — | 0 | — |
| | 36₇ | E−G+ | NEIYAKYFPSPAPAR | 0 | — | 0 | — |
| | 36₁₃ | E−G+ | YFPSPAPARSTYQVA | 0 | — | 0 | — |
| | 36₂₀ | E−G+ | ARSTYQVAALPLDAR | 0 | — | 0 | — |
| | 36₂₉ | E−G+ | LPLDARIEIECIAAL | 0 | — | 0 | — |
| 37 | 37₅ | E−G+ | EEAASTLPGLSSSTL | 0 | — | 0 | — |
| 38 | 38₃ | E−G+ | STKIFLESSTMESRA | 0 | — | 0 | — |
| | 38₅₃ | E−G+ | CAAVLAASAVVVLVV | 0 | — | 0 | — |
| | 38₆₂ | E−G+ | VVVLVVASGLAGSRV | 0 | — | 0 | — |
| | 38₇₁ | E−G+ | LAGSRVVRVAVDVAT | 0 | — | 0 | — |
| | 38₁₅₉ | E−G+ | GWYHLFYQYNPEGAV | 0 | — | 0 | — |
| | 38₁₈₄ | E−G+ | SRDLIHWRHLPLAMV | 0 | — | 0 | — |
| | 38₂₂₁ | E−G+ | LNMLYTGSTNASVQV | 0 | — | 0 | — |
| | 38₃₀₂ | E−G+ | IAMVYKTKDFVSYEL | 0 | — | 0 | — |
| | 38₃₀₈ | E−G+ | TKDFVSYELIPGLLH | 0 | — | 0 | — |
| | 38₃₉₀ | E−G+ | WGKFYASKTFYDPAK | 0 | — | 0 | — |
| | 38₄₂₅ | E−G+ | KGWASLMSIPRTVDL | 0 | — | 0 | — |
| | 38₄₈₀ | E−G+ | LRHATQLDIEAAFRL | 0 | — | 0 | — |
| | 38₄₈₉ | E−G+ | EAAFRLDHAAVAALN | 0 | — | 0 | — |
| | 38₅₃₇ | E−G+ | EQTAVYFYVSRGLDG | 0 | — | 0 | — |
| | 38₅₇₁ | E−G+ | VKRVVGYTVPVLDGE | 0 | — | 0 | — |
| | 38₅₈₅ | E−G+ | EAFSVRVLVDHSIVE | 0 | — | 0 | — |
| | 38₆₁₇ | E−G+ | EAIYAAAGVYLFNNA | 0 | — | 0 | — |
| | 38₆₂₅ | E−G+ | VYLFNNATSGTVTVE | 0 | — | 0 | — |
| 39 | 39₄₂ | E−G+ | TDIVEVVVSPPYVFL | 0 | — | 0 | — |
| | 39₅₀ | E−G+ | SPPYVFLPTVKDKLR | 0 | — | 0 | — |
| | 39₈₀ | E−G+ | GAFTGEVSAEMLANL | 0 | — | 0 | — |
| | 39₈₆ | E−G+ | VSAEMLANLGIPWVI | 0 | — | 0 | — |
| | 39₁₁₁ | E−G+ | GESSEFVGDKVAYAL | 0 | — | 1 | 30 |
| | 39₁₁₈ | E−G+ | GDKVAYALAQGLKVI | 1 | 67 | 1 | 73 |
| | 39₁₄₆ | E−G+ | STMTVVAEQTKAIAD | 0 | — | 0 | — |
| | 39₁₆₄ | E−G+ | DWTNVVIAYEPVWAI | 0 | — | 0 | — |
| | 39₁₇₀ | E−G+ | IAYEPVWAIGTGKVA | 0 | — | 0 | — |
| | 39₂₄₄ | E−G+ | LKPEFIDIINAATVK | 0 | — | 0 | — |
| 40 | 40₂ | E−G+ | VWQHDRVEIIANDQG | 1 | 40 | 0 | — |
| | 40₈ | E−G+ | VEIIANDQGNRTTPS | 1 | 27 | 0 | — |
| | 40₁₉ | E−G+ | TTPSYVAFTDSERLI | 0 | — | 0 | — |
| | 40₃₈ | E−G+ | KNQVAMNPINTVFGE | 0 | — | 0 | — |
| | 40₄₄ | E−G+ | NPINTVFGEHLSTCT | 0 | — | 0 | — |
| 41 | 41₁ | E−G+ | SSTRGWCSRRRAGRG | 0 | — | 0 | — |
| 42 | 42₁₇ | E−G+ | EEKQFAAEEISSMVL | 0 | — | 0 | — |
| | 42₂₇ | E−G+ | SSMVLIKMREIAEAF | 0 | — | 0 | — |
| | 42₄₅ | E−G+ | SIKNAVVTVPAYFND | 0 | — | 0 | — |
| | 42₆₉ | E−G+ | GVIAGLNVLRIINEP | 0 | — | 1 | 33 |
| | 42₇₆ | E−G+ | VLRIINEPTAAAIAY | 0 | — | 0 | — |
| 43 | 43₁ | E−G+ | GILLDFVWYEPLTYN | 0 | — | 0 | — |
| | 43₄₄ | E−G+ | ETMQRLVADRLPNFT | 0 | — | 0 | — |
| | 43₁₁₄ | E−G+ | GYSKWLYVVPWGFYK | 0 | — | 0 | — |
| | 43₁₂₀ | E−G+ | YVVPWGFYKAVMHVK | 1 | 20 | 0 | — |
| | 43₁₆₄ | E−G+ | KFRIDYFDQYLHELK | 0 | — | 0 | — |
| | 43₁₈₅ | E−G+ | ARVTGYFAWSLLDNF | 0 | — | 0 | — |
| | 43₁₉₁ | E−G+ | FAWSLLDNFEWRMGF | 1 | 27 | 0 | — |
| 44 | 44₇₁ | E−G+ | FKDDPYIYAFDSLKY | 0 | — | 0 | — |
| | 44₇₉ | E−G+ | AFDSLKYIGIELWQV | 0 | — | 0 | — |
| | 44₈₈ | E−G+ | IELWQVKSGTLFDNI | 0 | — | 0 | — |
| | 44₉₆ | E−G+ | GTLFDNILITDDAAL | 0 | — | 0 | — |
| | 44₁₀₂ | E−G+ | ILITDDAALAKTFAE | 0 | — | 0 | — |
| 45 | 45₅ | E−G+ | KRPPRCCQDLVVLPL | 0 | — | 0 | — |
| 46 | 46₃ | E−G+ | RGLLRRARGGPHHRR | 1 | 40 | 0 | — |
| | 46₁₉ | E−G+ | RGAHRRVPLRPLRHR | 0 | — | 1 | 60 |
| | 46₄₀ | E−G+ | EGRRAKLRSAGEVEI | 1 | 177 | 0 | — |
| | 46₅₀ | E−G+ | GEVEIQFRRVKCKYP | 4 | 60 | 0 | — |
| | 46₆₇ | E−G+ | TKVTFHVVGVGPLLH | 1 | 70 | 1 | 160 |
| 47 | 47₂₆ | E−G+ | EDVAVSLAKYTAELS | 0 | — | 0 | — |
| | 47₄₁ | E−G+ | GKFAAERGAFTVVLS | 1 | 30 | 0 | — |
| | 47₄₉ | E−G+ | AFTVVLSGGTLIDTL | 1 | 43 | 0 | — |
| | 47₉₆ | E−G+ | DSNYKLAVDGLLSKV | 1 | 53 | 0 | — |
| | 47₁₃₅ | E−G+ | TVLKQLVKSGVLAMS | 2 | 22 | 0 | — |
| | 47₁₄₂ | E−G+ | KSGVLAMSTATGFPR | 1 | 40 | 0 | — |
| | 47₁₉₆ | E−G+ | PPPQRITFTFPVIKS | 0 | — | 0 | — |
| | 47₂₀₂ | E−G+ | TFTFPVIKSSAYVAM | 0 | — | 0 | — |
| | 47₂₃₅ | E−G+ | KTLPLLPTEMAILQD | 0 | — | 0 | — |
| 48 | 48₂ | E−G+ | NKLIGARSFFESAKW | 0 | — | 0 | — |
| | 48₆₅ | E−G+ | RAHIAFYQVCFEQKG | 0 | — | 0 | — |
| | 48₁₂₄ | E−G+ | AALNGVFVSTAAGNI | 0 | — | 0 | — |
| | 48₁₄₉ | E−G+ | APWLLTVGASTSDRR | 0 | — | 0 | — |
| | 48₁₅₈ | E−G+ | STSDRRFAATVKLGS | 0 | — | 0 | — |
| | 48₂₃₅ | E−G+ | VLRAGAFGMIVVAPA | 0 | — | 0 | — |
| | 48₂₄₁ | E−G+ | FGMIVVAPAVFGPVI | 0 | — | 0 | — |
| | 48₂₆₉ | E−G+ | YAVGQKIKAYLEAES | 0 | — | 1 | 297 |
| | 48₃₃₅ | E−G+ | VPGVVDIVLQPKEVM | 0 | — | 0 | — |
| | 48₃₆₂ | E−G+ | CPHLAGIAALLKNAH | 0 | — | 0 | — |
| | 48₄₂₉ | E−G+ | GLVYNLTAAEYIPYL | 0 | — | 0 | — |
| | 48₄₈₇ | E−G+ | KADSVVNASRAVTNV | 0 | — | 0 | — |
| | 48₅₂₆ | E−G+ | KLTFKALEEVLNYTV | 0 | — | 0 | — |
| | 48₅₃₃ | E−G+ | EEVLNYTVTVKTAAV | 0 | — | 0 | — |
| | 48₅₅₂ | E−G+ | IEGQLKWVSSKHIVR | 0 | — | 0 | — |
| | 48₅₅₈ | E−G+ | WVSSKHIVRSPILIL | 0 | — | 0 | — |
| 49 | 49₁ | E−G+ | ELRKTYNLLDAVSRH | 4 | 847 | 1 | 100 |
| | 49₁₈ | E−G+ | QVYPRSWSAVMLTFD | 2 | 602 | 0 | — |
| | 49₂₆ | E−G+ | AVMLTFDNAGMWNVR | 3 | 899 | 1 | 503 |
| | 49₄₂ | E−G+ | NVWERHYLAGEMTLM | 1 | 130 | 0 | — |
| | 49₅₀ | E−G+ | GEQLYISVISPARSL | 0 | — | 1 | 80 |
| 50 | 50₁₀ | E−G+ | DSSEYAFRTAVSSSM | 0 | — | 0 | — |
| | 50₄₄ | E−G+ | IGNLRLDNTTLIDKD | 1 | 40 | 0 | — |
| | 50₈₈ | E−G+ | EIPMIQNILSRSQIF | 0 | — | 2 | 158 |
| | 50₉₇ | E−G+ | SRSQIFDGIPNLMSL | 0 | — | 1 | 87 |
| | 50₁₀₃ | E−G+ | DGIPNLMSLDNVVKI | 0 | — | 2 | 158 |
| | 50₁₂₃ | E−G+ | IWVNVEYDSFYREHG | 0 | — | 0 | — |
| | 50₁₅₀ | E−G+ | EFPVTWVSSPEVALL | 0 | — | 1 | 97 |
| | 50₁₅₈ | E−G+ | SPEVALLKSLAGKLR | 1 | 27 | 1 | 87 |
| | 50₁₆₈ | E−G+ | AGKLRNSTKLIFRFL | 0 | — | 0 | — |
| | 50₁₇₄ | E−G+ | STKLIFRFLREDLVE | 1 | 30 | 0 | — |
| | 50₁₉₆ | E−G+ | GELLKDLKSIKAFAS | 0 | — | 1 | 43 |
| | 50₂₀₂ | E−G+ | LKSIKAFASGILVPK | 0 | — | 0 | — |
| 51 | 51₁₅ | E−G+ | CEGILKLLETHLVPS | 0 | — | 0 | — |
| | 51₂₁ | E−G+ | LLETHLVPSSTAPES | 0 | — | 1 | 47 |
| | 51₃₃ | E−G+ | PESKVFYLKMKGDYH | 1 | 27 | 1 | 53 |
| | 51₆₇ | E−G+ | MNSYKAAQDIALADL | 0 | — | 1 | 43 |
| | 51₈₂ | E−G+ | APTHPIRLGLALKIS | 0 | — | 0 | — |
| 52 | 52₁ | E−G+ | LLGLLAPLASAQLSR | 0 | — | 1 | 33 |
| | 52₂₃ | E−G+ | PDAEKIVAAVIEKKL | 1 | 20 | 0 | — |
| | 52₄₅ | E−G+ | AGLLRLLFHDCFANG | 1 | 113 | 1 | 37 |
| | 52₆₀ | E−G+ | CDASILIDPLSNQSA | 3 | 91 | 5 | 151 |
| | 52₂₂₉ | E−G+ | IDSSYFANVLAKKMP | 1 | 50 | 1 | 50 |
| | 52₂₆₆ | E−G+ | KPNDFMPTFAKAMEK | 0 | — | 1 | 33 |
| | 52₂₇₇ | E−G+ | PTFAKAMEKLSVLKV | 2 | 53 | 2 | 62 |
| | 52₃₀₉ | E−G+ | GGSVIRISSANPEDL | 1 | 70 | 2 | 72 |
| | 52₃₄₃ | E−G+ | DPWHVKTLKAAGAAH | 0 | — | 0 | — |
| 53 | 53₁ | E−G+ | WSEIQTLKPNLIGPF | 0 | — | 1 | 103 |
| | 53₃₁ | E−G+ | KFMTLAGFLDYAKAS | 0 | — | 0 | — |
| | 53₄₆ | E−G+ | NISGILIGIEHAAYL | 0 | — | 0 | — |
| | 53₅₇ | E−G+ | AAYLATRGLDVVDAV | 1 | 880 | 1 | 1030 |
| | 53₆₄ | E−G+ | GLDVVDAVSNALIKS | 1 | 23 | 0 | — |
| | 53₈₄ | E−G+ | TKQQVFIQSEDPPVL | 3 | 42 | 0 | — |
| | 53₉₆ | E−G+ | PVLSAFKKFPKFNRV | 1 | 53 | 0 | — |
| | 53₁₀₃ | E−G+ | KFPKFNRVFEIEFDI | 1 | 30 | 3 | 499 |
| | 53₁₂₆ | E−G+ | VEIKEFANAVKLRRS | 1 | 87 | 1 | 797 |
| | 53₁₃₅ | E−G+ | VKLRRSSAAQVDGFY | 3 | 104 | 0 | — |
| | 53₁₄₇ | E−G+ | GFYLTGFNAVVERLR | 0 | — | 0 | — |
| | 53₁₇₀ | E−G+ | GVLKNEFMSLAFDYW | 1 | 83 | 0 | — |
| | 53₂₀₂ | E−G+ | GLVTEFPSTAAAYFR | 1 | 63 | 1 | 153 |
| 54 | 54₃₉ | E−G+ | NIVVNVFNQLDQPLL | 1 | 43 | 0 | — |
| | 54₅₀ | E−G+ | QPLLFTWNGIQHRKN | 0 | — | 0 | — |
| | 54₉₃ | E−G+ | IGSFFYFPSIGMQRT | 5 | 447 | 4 | 183 |
| | 54₁₁₀ | E−G+ | GYGLISVVSRLLIPV | 0 | — | 0 | — |
| | 54₁₁₆ | E−G+ | VVSRLLIPVPFDPPA | 1 | 307 | 1 | 133 |
| 55 | 55₁₄ | E−G− | SVFKKFPKFRRVLVI | 0 | — | 0 | — |
| | 55₂₀ | E−G− | PKFRRVLVIDPVISG | 0 | — | 0 | — |
| | 55₄₀ | E−G− | IGEIKGFADAVMVSR | 0 | — | 1 | 167 |
| | 55₄₆ | E−G− | FADAVMVSRGSLVRV | 0 | — | 0 | — |
| | 55₅₂ | E−G− | VSRGSLVRVNGFFLT | 0 | — | 0 | — |
| | 55₆₀ | E−G− | VNGFFLTGFNDLVTE | 0 | — | 1 | 903 |
| 56 | 56₂ | E−G− | KELGGKILRQPGPLP | 0 | — | 0 | — |
| | 56₈ | E−G− | ILRQPGPLPGLNTKI | 0 | — | 0 | — |
| | 56₁₅ | E−G− | LRGLNTKIASFLDPD | 0 | — | 0 | — |
| | 56₂₁ | E−G− | KIASFLDPDGWKVVL | 0 | — | 1 | 343 |
| | 56₃₀ | E−G− | GWKVVLVDHADFLKE | 0 | — | 0 | — |
| 57 | 57₃ | E−G− | QDNAKIVQIDSSIQA | 0 | — | 0 | — |
| | 57₂₉ | E−G− | RLVCLRVHPTFTLLH | 0 | — | 0 | — |
| | 57₃₆ | E−G− | HPTFTLLHPTEVVVA | 0 | — | 0 | — |
| | 57₄₅ | E−G− | TEVVVAFTAINGSRQ | 0 | — | 0 | — |
| | 57₉₁ | E−G− | LVNRFEISQVSKCLV | 0 | — | 0 | — |
| 58 | 58₁₃ | E−G− | ADPCSEYFVEAYLNN | 0 | — | 0 | — |
| | 58₁₉ | E−G− | YFVEAYLNNPLVQKA | 0 | — | 0 | — |
| | 58₃₀ | E−G− | VQKAIHANTALNYPW | 0 | — | 0 | — |
| | 58₆₂ | E−G− | PSMLAHIKALVTTGI | 0 | — | 0 | — |
| | 58₈₀ | E−G− | LYSGDLDAMVPVTAS | 0 | — | 0 | — |
| | 58₁₄ | E−G− | LNYPWTGCRTRTYNL | 0 | — | 0 | — |
| | 58₂₆ | E−G− | YNLRRFGASPPSMLA | 0 | — | 0 | — |
| | 58₄₁ | E−G− | HIKALVTTASASGCT | 0 | — | 0 | — |
| 59 | 59₄₇ | E−G− | VKKIVTVLNEAEVPS | 0 | — | 0 | — |
| | 59₆₂ | E−G− | EDAVEVVVSPPFVFL | 0 | — | 0 | — |
| | 59₆₉ | E−G− | VSPPFVFLQQAKALL | 0 | — | 0 | — |
| | 59₇₅ | E−G− | FLQQAKALLRPDFAV | 0 | — | 1 | 33 |
| | 59₈₁ | E−G− | ALLRPDFAVAAQNCW | 0 | — | 1 | 23 |
| | 59₁₀₀ | E−G− | GAFTGEISAEMLVNL | 0 | — | 0 | — |
| | 59₁₀₆ | E−G− | ISAEMLVNLQVPWVI | 0 | — | 1 | 37 |
| | 59₁₃₂ | E−G− | ESNDFVADKVAYALA | 0 | — | 0 | — |
| | 59₁₃₈ | E−G− | ADKVAYALAQGLKVI | 1 | 47 | 2 | 45 |
| | 59₁₆₆ | E−G− | TTMEVVAAQTKAIAE | 0 | — | 1 | 23 |
| | 59₁₈₅ | E−G− | WTNVVLAYEPVWAIG | 1 | 20 | 0 | — |
| | 59₂₁₆ | E−G− | LRKWLHANVGPAVAE | 0 | — | 2 | 138 |
| | 59₂₆₆ | E−G− | PEFVDIIKSATVKSS | 0 | — | 1 | 137 |
| 60 | 60₂₆ | E−G− | EDSHFVVELTYNYGV | 0 | — | 0 | — |
| | 60₁₂₂ | E−G− | RAIKFYEKAFGMELL | 0 | — | 0 | — |
| | 60₁₄₁ | E−G− | NPQYKYTIAMMGYGP | 0 | — | 0 | — |
| | 60₁₅₈ | E−G− | KNAVLELTYNYGVKE | 0 | — | 0 | — |
| | 60₂₂₄ | E−G− | DGWKSVFVDNLDFLK | 0 | — | 0 | — |
| 61 | 61₁ | E−G− | LQSKNCILYLCSIMI | 0 | — | 0 | — |
| | 61₇ | E−G− | ILYLCSIMICNCKVS | 0 | — | 0 | — |
| | 61₁₃ | E−G− | IMICNCKVSKVLNTY | 0 | — | 0 | — |
| | 61₁₉ | E−G− | KVSKVLNTYIFLLYL | 1 | 27 | 0 | — |
| 62 | 62₁₁ | E−G− | YQPAAMRRLSLILLA | 1 | 63 | 0 | — |
| | 62₁₇ | E−G− | RRLSLILLAAAALLA | 0 | — | 0 | — |
| | 62₂₃ | E−G− | LLAAAALLAAAVSAE | 0 | — | 0 | — |
| | 62₅₃ | E−G− | CPRAERIIAEVVQSK | 0 | — | 0 | — |
| | 62₁₁₉ | E−G− | AFDAVVRSKLALELE | 0 | — | 0 | — |
| | 62₁₄₀ | E−G− | CADILAIASRVLVTM | 1 | 43 | 0 | — |
| | 62₁₈₅ | E−G− | NFTVGRIIELFTAKG | 4 | 200 | 6 | 223 |
| | 62₁₉₁ | E−G− | IIELFTAKGFTVQEM | 2 | 298 | 4 | 179 |
| | 62₂₀₀ | E−G− | FTVQEMVALSGAHTL | 0 | — | 1 | 537 |
| | 62₂₆₄ | E−G− | IAAFNDIMSSSVLSS | 0 | — | 0 | — |
| | 62₂₇₆ | E−G− | FDNIYSVNIERGLGL | 0 | — | 1 | 73 |
| | 62₃₁₄ | E−G− | NTDFFEDFAKAIEKL | 0 | — | 0 | — |
| 63 | 63₅ | E−G− | YPHMLLILLLLHGAN | 0 | — | 0 | — |
| | 63₁₁ | E−G− | ILLLLHGANAALDEP | 0 | — | 1 | 47 |
| | 63₅₁ | E−G− | ESSLYAYQFAMSNGL | 0 | — | 0 | — |
| | 63₈₆ | E−G− | SGLRLDKSTLIAEVF | 0 | — | 0 | — |
| | 63₁₁₄ | E−G− | IHGWFAVDFTAAELV | 1 | 120 | 2 | 227 |
| 64 | 64₁₇ | E−G− | EIPTISYSDLYQLAG | 0 | — | 0 | — |
| | 64₂₃ | E−G− | YSDLYQLAGVVAVEV | 0 | — | 0 | — |
| | 64₆₉ | E−G− | DHLRQVFGKQMGLSD | 0 | — | 0 | — |
| | 64₁₁₁ | E−G− | KNPLKFDNTYFTELL | 1 | 100 | 1 | 47 |
| | 64₁₅₉ | E−G− | KAFFEDYKEAHLRLS | 0 | — | 0 | — |
| 65 | 65₂₂ | E−G− | FSCDSAYQVTYIVRG | 1 | 23 | 1 | 47 |
| | 65₂₈ | E−G− | YQVTYIVRGSGRVQV | 1 | 87 | 1 | 367 |
| | 65₅₅ | E−G− | IEGGSLFIVPRFHVV | 1 | 130 | 1 | 113 |
| | 65₇₇ | E−G− | GMEWFSIITTPNPIF | 0 | — | 0 | — |
| | 65₉₆ | E−G− | GKTSVWKAISPEVLE | 0 | — | 0 | — |
| 66 | 66₄ | n.d. | SCRGRCPCSLRTPAW | 0 | — | 0 | — |
| | 66₁₂ | n.d. | SLRTPAWGSCSRMAP | 0 | — | 0 | — |
| | 66₁₈ | n.d. | WGSCSRMAPCNCRCP | 0 | — | 0 | — |
| | 66₂₈ | n.d. | NCRCPCSTRGARRRL | 0 | — | 0 | — |
| | 66₃₄ | n.d. | STRGARRRLPGRTSS | 0 | — | 0 | — |
| 67 | 67₉ | n.d. | TAPTSRRSPSAPSPH | 0 | — | 0 | — |
| | 67₄₁ | n.d. | TRTCISTRRIPSRPT | 0 | — | 0 | — |
| | 67₅₈ | n.d. | PWSTCRAARSPTPSA | 0 | — | 0 | — |
| | 67₉₆ | n.d. | DRREIWLSEMVAWVG | 0 | — | 0 | — |
| | 67₁₀₃ | n.d. | SEMVAWVGLQLAFWI | 0 | — | 0 | — |
| 68 | 68₈ | n.d. | PWRPPRRWSCCPLPW | 0 | — | 0 | — |
| | 68₁₆ | n.d. | SCCPLPWPGTRRWWF | 0 | — | 0 | — |
| | 68₂₄ | n.d. | GTRRWWFRCHQPPSS | 0 | — | 0 | — |
| | 68₃₀ | n.d. | FRCHQPPSSRTAPGS | 0 | — | 0 | — |
| | 68₄₂ | n.d. | PGSSRSLYGSPSTSC | 0 | — | 0 | — |
| 69 | 69₁ | n.d. | VKVAPAALVNVLEAR | 0 | — | 0 | — |
| | 69₈ | n.d. | LVNVLEARSALTISV | 0 | — | 0 | — |
| | 69₁₄ | n.d. | ARSALTISVLRISSM | 0 | — | 0 | — |
| | 69₂₀ | n.d. | ISVLRISSMPFSVYH | 0 | — | 0 | — |
| | 69₅₃ | n.d. | LAAFWGKRYPLLSAG | 0 | — | 0 | — |
| 70 | 70₁ | n.d. | SSPSCAPESTHAVRA | 0 | — | 0 | — |
| | 70₇ | n.d. | PESTHAVRALPSTHT | 0 | — | 0 | — |
| | 70₁₃ | n.d. | VRALPSTHTARILLR | 0 | — | 0 | — |
| | 70₁₉ | n.d. | THTARILLRSTTANV | 0 | — | 0 | — |
| | 70₂₅ | n.d. | LLRSTTANVSGCKDR | 0 | — | 0 | — |
| 71 | 71₂ | n.d. | VQVPGGHQGDLPRGE | 0 | — | 0 | — |
| | 71₂₂ | n.d. | LPGAAGEVCRRRRRR | 0 | — | 0 | — |
| | 71₄₅ | n.d. | GQGQVDRAQGVVGSH | 0 | — | 0 | — |
| | 71₅₄ | n.d. | GVVGSHLEDRHSRQA | 0 | — | 0 | — |
| | 71₆₀ | n.d. | LEDRHSRQAHRPLHR | 0 | — | 0 | — |
| 72 | 72₈ | n.d. | KHLIYVTGWSVYTEI | 0 | — | 0 | — |
| | 72₁₄ | n.d. | TGWSVYTEITLLRDA | 0 | — | 0 | — |
| | 72₄₉ | n.d. | SEGVRVLMLVWDDRT | 0 | — | 0 | — |
| | 72₁₀₀ | n.d. | DDSGSIVQDLQISTM | 0 | — | 0 | — |
| | 72₁₀₉ | n.d. | LQISTMFTHHQKIVV | 0 | — | 0 | — |
| | 72₁₃₆ | n.d. | RRRRIMSFVGGLDLC | 0 | — | 0 | — |
| | 72₂₀₂ | n.d. | PVAWDVLYNFEQRWR | 0 | — | 0 | — |
| | 72₂₂₀ | n.d. | GKDLLIQLRDLADEI | 0 | — | 0 | — |
| | 72₂₄₈ | n.d. | AWNVQLFRSIDGGAA | 0 | — | 0 | — |
| | 72₂₉₁ | n.d. | DAYICAIRRAKSFIY | 1 | 40 | 1 | 77 |
| | 72₂₉₇ | n.d. | IRRAKSFIYIENQYF | 0 | — | 0 | — |
| | 72₃₀₃ | n.d. | FIYIENQYFLGSSYC | 0 | — | 0 | — |
| | 72₃₅₁ | n.d. | RFTVYVVVPMWPEGI | 0 | — | 0 | — |
| | 72₃₇₉ | n.d. | RRTMEMMYTDIAQAI | 0 | — | 0 | — |
| | 72₃₈₅ | n.d. | MYTDIAQAIQAKGID | 0 | — | 0 | — |
| | 72₄₃₃ | n.d. | DYLKAQQNRRFMIYV | 1 | 190 | 1 | 33 |
| | 72₄₄₃ | n.d. | FMIYVHTKMMIVDDE | 0 | — | 0 | — |
| | 72₄₅₃ | n.d. | IVDDEYIIVGSANIN | 0 | — | 0 | — |
| | 72₄₈₄ | n.d. | YQPYHLAASRPARGQ | 0 | — | 0 | — |
| | 72₄₉₇ | n.d. | GQVHGFRMALWYEHL | 0 | — | 0 | — |
| | 72₅₀₃ | n.d. | RMALWYEHLGMVDEA | 0 | — | 0 | — |
| | 72₅₂₆ | n.d. | CVRKVNAMADRYWNL | 0 | — | 0 | — |
| | 72₅₇₀ | n.d. | LPGVEFFPDTQARIL | 0 | — | 0 | — |
| 73 | 73₄₂ | n.d. | HTFKSLFESWPVSST | 0 | — | 0 | — |
| | 73₁₂₇ | n.d. | DCYIVLYTYHSGEKR | 0 | — | 0 | — |
| | 73₁₄₄ | n.d. | FYLTYWIGKDSVLED | 0 | — | 0 | — |
| | 73₁₅₉ | n.d. | QHMALQIATTIWNSM | 0 | — | 0 | — |
| | 73₁₈₇ | n.d. | EPPQFIALFQPMVIL | 0 | — | 0 | — |
| | 73₂₁₉ | n.d. | KDETYSGTGIALVHI | 0 | — | 0 | — |
| | 73₂₂₅ | n.d. | GTGIALVHIHGTSIH | 0 | — | 0 | — |
| | 73₂₄₀ | n.d. | NNKTLQVDAVSISLS | 0 | — | 0 | — |
| | 73₂₅₆ | n.d. | TDCFVLQSGNSMFTW | 0 | — | 0 | — |
| | 73₂₇₉ | n.d. | QQQWAAKVAEFLKPG | 0 | — | 0 | — |
| | 73₃₂₆ | n.d. | DVLREPHLYTFSFRN | 1 | 77 | 0 | — |
| | 73₃₄₃ | n.d. | LEVTEVFNFSQDDLL | 1 | 63 | 0 | — |
| | 73₃₄₉ | n.d. | FNFSQDDLLTEDVMI | 1 | 90 | 0 | — |
| | 73₃₆₀ | n.d. | DVMILDTHAEVFVWM | 0 | — | 0 | — |
| | 73₄₁₉ | n.d. | CFFRTYFSWDNTRSV | 0 | — | 0 | — |
| | 73₄₃₇ | n.d. | NSFQKKLSLLFGMRS | 0 | — | 0 | — |
| | 73₄₆₆ | n.d. | RASALAALSSAFNPS | 0 | — | 0 | — |
| | 73₅₀₀ | n.d. | QRASALAALSSSLNP | 0 | — | 0 | — |
| | 73₅₃₁ | n.d. | SQRAAAVAALSNVLT | 0 | — | 0 | — |
| | 73₅₃₇ | n.d. | VAALSNVLTAEGSTL | 0 | — | 0 | — |
| | 73₆₀₁ | n.d. | ETTFSYDRLISKSTD | 0 | — | 0 | — |
| | 73₆₂₂ | n.d. | YKRRETYLSDSEFET | 0 | — | 0 | — |
| | 73₆₃₂ | n.d. | SEFETVFGVTKEEFY | 0 | — | 0 | — |
| | 73₆₆₀ | n.d. | SRSFLKHSLLRTQRL | 1 | 73 | 0 | — |
| | 73₆₆₆ | n.d. | HSLLRTQRLHKFLVC | 1 | 87 | 0 | — |
| | 73₆₇₄ | n.d. | LHKFLVCSSMIGVMA | 1 | — | 0 | — |
| | 73₆₉₄ | n.d. | SGNLVMFQMQDHQLI | 1 | 157 | 0 | — |
| | 73₇₀₆ | n.d. | QLIYPLISPSFLVYS | 1 | 200 | 0 | — |
| | 73₇₁₂ | n.d. | ISPSFLVYSFFVHDL | 1 | 77 | 0 | — |
| 74 | 74₅ | n.d. | ERLIYQTANSRLCSV | 0 | — | 0 | — |
| | 74₁₂ | n.d. | ANSRLCSVLPKEEFY | 0 | — | 0 | — |
| | 74₁₉ | n.d. | VLPKEEFYQQPRWKQ | 0 | — | 0 | — |
| | 74₂₅ | n.d. | FYQQPRWKQELQKRK | 0 | — | 0 | — |
| 75 | 75₂ | n.d. | TGAAAAMTTTIRSTA | 0 | — | 0 | — |
| | 75₁₀ | n.d. | TTIRSTATARPRAIV | 0 | — | 0 | — |
| 76 | 76₁₁ | E−G− | NIWADDLAASLSTLE | 0 | — | 1 | 390 |
| | 76₁₇ | E−G− | IAIAFLSVSNNYEYI | 1 | 47 | 0 | — |
| | 76₂₄ | E−G− | VSNNYEYILSDKLVV | 0 | — | 0 | — |
| | 76₃₃ | E−G− | KDKLVVSTSCSLMHT | 0 | — | 0 | — |
| | 76₄₀ | E−G− | TSCSLMHTAVDLVNE | 1 | 160 | 0 | — |
| | 76₅₅ | E−G− | TKLDSEIKSWLAFAA | 1 | 200 | 1 | 323 |
| | 76₆₁ | E−G− | IKSWLAFAAQKVVEV | 0 | — | 0 | — |
| | 76₇₁ | E−G− | KVVEVNALGKALVGL | 0 | — | 0 | — |
| | 76₈₅ | E−G− | LKDEAYFAANAAAQA | 1 | 203 | 1 | 153 |
| | 76₁₇₅ | E−G− | EAYVSAIKEEISKVV | 0 | — | 0 | — |
| | 76₁₈₅ | E−G− | ISKVVKIQEELDIDV | 0 | — | 0 | — |
| | 76₂₁₀ | E−G− | MVEYFGEQLSGFAFT | 0 | — | 0 | — |
| | 76₂₁₈ | E−G− | LSGFAFTANGWVQSY | 0 | — | 0 | — |
| | 76₂₅₀ | E−G− | NPMTVFWSKMAQSMT | 2 | 138 | 0 | — |
| 77 | 77₃ | E−G− | EGPLMLYVSKMIPAS | 0 | — | 0 | — |
| | 77₁₉ | E−G− | KGRFFAFGRVFAGRV | 0 | — | 0 | — |
| | 77₇₉ | E−G− | GNTVALVGLDQFITK | 0 | — | 0 | — |
| | 77₈₅ | E−G− | VGLDQFITKNATLTG | 0 | — | 0 | — |
| | 77₁₀₇ | E−G− | PIRAMKFSVSPVVRV | 0 | — | 0 | — |
| | 77₁₇₉ | E−G− | FMGGAEIIVSPPVVS | 0 | — | 0 | — |
| | 77₁₈₈ | E−G− | SPPVVSFRETVLDKS | 1 | 107 | 0 | — |
| | 77₂₁₂ | E−G− | NKHNRLYMEARPLEE | 1 | 107 | 0 | — |
| | 77₃₃₈ | E−G− | PTARRVIFASQLTAK | 0 | — | 0 | — |
| | 77₃₅₁ | E−G− | AKPRLLEPVYLVEIQ | 0 | — | 0 | — |
| | 77₃₅₇ | E−G− | EPVYLVEIQAPEGAL | 0 | — | 0 | — |
| | 77₃₉₅ | E−G− | PLYNIKAYLPVIESF | 0 | — | 0 | — |
| | 77₄₀₃ | E−G− | LPVIESFGFSATLRA | 0 | — | 1 | 333 |
| | 77₄₀₉ | E−G− | FGFSATLRAATSGQA | 0 | — | 0 | — |
| 78 | 78₅ | E−G− | SLKLHKACEAFNPYD | 0 | — | 0 | — |
| | 78₁₃ | E−G− | EAFDPYYGKISLSKV | 0 | — | 0 | — |
| | 78₂₅ | E−G− | SKVRSFLTEAKAKHI | 0 | — | 0 | — |
| | 78₃₁ | E−G− | LTEAKAKHIEWNCDV | 0 | — | 0 | — |
| | 78₁₁₆ | E−G− | KEKRWNAALTSISAS | 0 | — | 0 | — |
| | 78₁₃₃ | E−G− | GSAYVDLGSLLAERT | 0 | — | 0 | — |
| | 78₁ | E−G− | RHLARQFIPHLHQRF | 0 | — | 0 | — |
| | 78₇ | E−G− | FIPHLHQRFIHPPIH | 0 | — | 0 | — |
| | 78₂₄ | E−G− | NTMENLSSTIFSFVI | 0 | — | 0 | — |
| | 78₃₂ | E−G− | TIFSFVILLSASASL | 0 | — | 0 | — |
| | 78₃₈ | E−G− | ILLSASASLVVAGDP | 0 | — | 0 | — |
| | 78₈₅ | E−G− | ELAEMEVSAAFHLFS | 0 | — | 2 | 217 |
| | 78₉₂ | E−G− | SAAFHLFSMAVTAAR | 0 | — | 0 | — |
| | 78₉₈ | E−G− | FSMAVTAARSQQWND | 0 | — | 0 | — |
| | 78₁₄₃ | E−G− | KISLSKVRSFLTEAK | 0 | — | 1 | 783 |
| 79 | 79₁₃₂ | E−G− | QQYTAALSPILFECL | 1 | 183 | 0 | — |
| | 79₁₃₈ | E−G− | LSPILFECLIHPMLG | 1 | 83 | 0 | — |
| | 79₁₆₀ | E−G− | VEDNLVKLKNVLNVY | 1 | 100 | 0 | — |
| | 79₁₆₆ | E−G− | KLKNVLNVYEARLTK | 0 | — | 0 | — |
| | 79₁₁ | E−G− | EVYEARLTKFKYLAG | 0 | — | 1 | 47 |
| | 79₁₈ | E−G− | TKFKYLAGDYLSLAD | 1 | 37 | 0 | — |
| | 79₂₄ | E−G− | AGDYLSLADLNHVST | 0 | — | 0 | — |
| | 79₅₇ | E−G− | VKAWWTDLLAKPSVQ | 1 | 100 | 1 | 23 |
| 80 | 80₁ | E−G− | KLRFTCLSSTGSSCL | 1 | 133 | 0 | — |
| | 80₇ | E−G− | LSSTGSSCLFVLILF | 1 | 147 | 1 | 63 |
| 81 | 81₁ | E−G− | EKLKKVLEVYEARLS | 2 | 100 | 0 | — |
| | 81₁₈ | E−G− | SYLAGDFVSFADLNH | 1 | 40 | 0 | — |
| | 81₂₄ | E−G− | FVSFADLNHFPKTFY | 0 | — | 0 | — |
| | 81₃₃ | E−G− | FPKTFYFMATPHASL | 0 | — | 0 | — |
| | 81₅₃ | E−G− | HVKAWWERIMARPAV | 0 | — | 0 | — |
| | 81₆₁ | E−G− | IMARPAVKKIAAAMV | 0 | — | 0 | — |
| 82 | 82₃₃ | E−G− | KRKVRGFWRVHQISA | 0 | — | 0 | — |
| | 82₃₉ | E−G− | FWRVHQISARMAPVK | 0 | — | 0 | — |
| | 82₄₉ | E−G− | MAPVKLYGATLSWNV | 0 | — | 0 | — |
| | 82₁₀₉ | E−G− | GDLYIFESRAICKYA | 1 | 290 | 0 | — |
| | 82₁₅₀ | E−G− | EANQYTAALGPILFE | 0 | — | 0 | — |
| 83 | 83₅ | E−G− | ACSLFLNYAVSFNYF | 1 | 57 | 0 | — |
| | 83₁₂ | E−G− | YAVSFNYFVCNLLQE | 1 | 70 | 1 | 37 |
| | 83₂₂ | E−G− | NLLQERLKKLKSEHG | 1 | 83 | 1 | 47 |
| | 83₅₄ | E−G− | GMTGMLWETSLLDPE | 1 | 107 | 0 | — |
| | 83₉₆ | E−G− | PEGLLWLLLTGKVPT | 1 | 93 | 1 | 33 |
| | 83₁₃₀ | E−G− | YVYKAIDALPVTAHP | 0 | — | 0 | — |
| | 83₁₄₇ | E−G− | QFTTGVMALQVESEF | 0 | — | 0 | — |
| | 83₁₈₀ | E−G− | EDCLNLIARLPQVAS | 0 | — | 0 | — |
| | 83₁₈₆ | E−G− | IARLPQVASYVYRRI | 1 | 187 | 1 | 33 |
| | 83₂₀₉ | E−G− | ADNSLDYAANFSHML | 1 | 130 | 1 | 53 |
| | 83₂₂₇ | E−G− | DPKMLELMRLYITIH | 1 | 63 | 1 | 40 |
| | 83₂₆₀ | E−G− | ALSDPYLSFAAALNG | 1 | 130 | 1 | 70 |
| | 83₂₆₆ | E−G− | LSFAAALNGLAGPLH | 1 | 103 | 0 | — |
| | 83₂₇₈ | E−G− | PLHGLANQEVLLWIK | 0 | — | 0 | — |
| | 83₂₈₅ | E−G− | QEVLLWIKSVMEETG | 0 | — | 0 | — |
| | 83₃₀₆ | E−G− | QLKEYVWKTLKSGKV | 1 | 90 | 1 | 40 |
| | 83₃₄₉ | E−G− | EDPLFQLVSKLYEVV | 1 | 160 | 0 | — |
| | 83₃₅₅ | E−G− | LVSKLYEVVPGILTE | 1 | 207 | 0 | — |
| | 83₃₈₄ | E−G− | SGVLLNHFGLVEARY | 1 | 140 | 0 | — |
| | 83₄₀₀ | E−G− | TVLFGVSRSMGIGSQ | 1 | 123 | 0 | — |
| | 83₄₁₂ | E−G− | GSQLIWDRALGLPLE | 1 | 37 | 1 | 57 |
| 84 | 84₁₀ | E−G− | GPVTILNWSFVRNDQ | 1 | 47 | 0 | — |
| | 84₂₅ | E−G− | PRFETCYQIALAIKK | 0 | — | 0 | — |
| | 84₄₈ | E−G− | GIQVIQIDEAALREG | 0 | — | 0 | — |
| | 84₆₉ | E−G− | EHAFYLDWAVHSFRI | 1 | 53 | 1 | 303 |
| | 84₁₀₃ | E−G− | FNDIIHSIINMDADV | 1 | 50 | 0 | — |
| | 84₁₂₅ | E−G− | SDEKLLSVFREGVTY | 0 | — | 0 | — |
| | 84₁₆₅ | E−G− | VNKMLAVLDTNILWV | 1 | 47 | 0 | — |
| | 84₁₈₇ | E−G− | TRKYAEVMPALTNMV | 0 | — | 0 | — |
| | 84₁₉₅ | E−G− | PALTNMVTAAKLIRT | 0 | — | 0 | — |
| | 84₂₀₁ | E−G− | VTAAKLIRTQLASTK | 0 | — | 0 | — |
| 85 | 85₁₀ | E−G− | GRGIKDEGLVVAPGQ | 0 | — | 0 | — |
| | 85₂₉ | E−G− | LTVGNIIAGDRFSMA | 0 | — | 0 | — |
| | 85₃₈ | E−G− | DRFSMAYDRTPEEIL | 0 | — | 0 | — |
| | 85₄₄ | E−G− | YDRTPEEILAIVYGT | 0 | — | 0 | — |
| | 85₅₀ | E−G− | EILAIVYGTGNPAQA | 0 | — | 0 | — |
| 86 | 86₁₂ | E−G− | TREENVYMAKLAEQA | 0 | — | 0 | — |
| | 86₂₉ | E−G− | YEEMVEFMEKVAKTA | 0 | — | 0 | — |
| | 86₅₁ | E−G− | EERNLLSVAYKNVIG | 0 | — | 0 | — |
| | 86₅₉ | E−G− | AYKNVIGARRASWRI | 0 | — | 0 | — |
| | 86₆₇ | E−G− | RRASWRIISSIEQKE | 0 | — | 0 | — |
| | 86₈₆ | E−G− | NEAYVASIKEYRTRI | 0 | — | 0 | — |
| | 86₁₀₅ | E−G− | SKICDGILKLLDSHL | 0 | — | 0 | — |
| | 86₁₁₁ | E−G− | ILKLLDSHLVPSATA | 0 | — | 0 | — |
| | 86₁₂₆ | E−G− | AESKVFYLKMKGDYH | 0 | — | 0 | — |
| | 86₁₃₇ | E−G− | GDYHRYLAEFKAGAE | 0 | — | 0 | — |
| | 86₁₅₈ | E−G− | NTLVAYKSAQDIALA | 0 | — | 0 | — |
| | 86₁₇₄ | E−G− | LPTTHPIRLGLALNF | 0 | — | 0 | — |
| | 86₁₈₀ | E−G− | IRLGLALNFSVFYYE | 0 | — | 0 | — |
| | 86₁₈₆ | E−G− | LNFSVFYYEILNSPD | 0 | — | 0 | — |
| | 86₂₂₅ | E−G− | YKDSTLIMQLLRDNL | 0 | — | 0 | — |
| | 86₂₃₁ | E−G− | IMQLLRDNLTLWTSD | 0 | — | 1 | 73 |
| 87 | 87₈ | E−G− | GSRALPFLLQLTKQP | 0 | — | 0 | — |
| | 87₅₁ | E−G− | VKVYVVYYSMYGHVG | 0 | — | 0 | — |
| | 87₈₀ | E−G− | GVEVKVWQVPEILSE | 0 | — | 0 | — |
| | 87₁₁₉ | E−G− | ADGILFGFPTRFGMM | 0 | — | 0 | — |
| | 87₂₃₄ | E−G− | FHQGKYFAGIAKKLK | 0 | — | 0 | — |
| 88 | 88₂ | E−G− | DVYPTVCLPMCVCVL | 0 | — | 0 | — |
| 89 | 89₂₁ | E−G− | EPAYFATAESVRDHL | 1 | 37 | 0 | — |
| | 89₅₃ | E−G− | QTYYLSMEYLQGRAL | 1 | 37 | 0 | — |
| | 89₇₀ | E−G− | AVGNLGITGAYAEAV | 0 | — | 0 | — |
| | 89₈₁ | E−G− | AEAVKKFGYELEALA | 1 | 33 | 0 | — |
| | 89₁₁₀ | E−G− | RLAACFLDSMATLNL | 0 | — | 0 | — |
| | 89₁₃₁ | E−G− | LRYRYGLFKQRIAKE | 0 | — | 1 | 663 |
| | 89₁₅₈ | E−G− | FSPWEIVRHDVVYPV | 0 | — | 0 | — |
| | 89₁₆₉ | E−G− | VYPVRFFGHVEILPD | 0 | — | 0 | — |
| | 89₁₉₁ | E−G− | GEVLNALAYDVPIPG | 2 | 288 | 1 | 1247 |
| | 89₂₀₃ | E−G− | IPGYKTKNAISLRLW | 0 | — | 0 | — |
| | 89₂₂₃ | E−G− | AEDFNLFQFNDGQYE | 0 | — | 0 | — |
| | 89₂₆₁ | E−G− | EGKLLRLKQQFFLCS | 0 | — | 0 | — |
| | 89₂₆₇ | E−G− | LKQQFFLCSASLQDI | 0 | — | 0 | — |
| | 89₃₁₃ | E−G− | PTLAIPELMRLLMDE | 0 | — | 0 | — |
| | 89₃₆₀ | E−G− | QSVMRKLLPRQMEII | 0 | — | 0 | — |
| | 89₃₇₅ | E−G− | EEIDKRFREMVISTR | 0 | — | 0 | — |
| | 89₄₀₆ | E−G− | PQKPVVRMANLCVVS | 0 | — | 0 | — |
| | 89₄₃₄ | E−G− | ILKEELFADYVSIWP | 0 | — | 0 | — |
| | 89₄₆₀ | E−G− | PRRWLRFCNPELSEI | 1 | 240 | 1 | 153 |
| | 89₅₀₁ | E−G− | EKLHAEWAAAKLASK | 0 | — | 0 | — |
| | 89₅₄₀ | E−G− | IKRIHEYKRQLMNIL | 0 | — | 2 | 45 |
| | 89₅₄₆ | E−G− | YKRQLMNILGAVYRY | 2 | 187 | 1 | 43 |
| | 89₅₅₄ | E−G− | LGAVYRYKKLKEMSA | 3 | 54 | 1 | 43 |
| | 89₅₈₃ | E−G− | GKAFATYTNAKRIVK | 2 | 68 | 0 | — |
| | 89₅₉₃ | E−G− | KRIVKLVNDVGAVVN | 1 | 77 | 2 | 195 |
| | 89₆₁₂ | E−G− | VNKYLKVVFIPNYNV | 0 | — | 1 | 213 |
| | 89₆₁₉ | E−G− | VFIPNYNVSVAEVLI | 2 | 28 | 6 | 259 |
| | 89₆₈₁ | E−G− | EDNFFLFGAKADQVA | 2 | 35 | 2 | 202 |
| | 89₇₂₃ | E−G− | TFGTYDYTPLLDSLE | 0 | — | 0 | — |
| | 89₇₄₈ | E−G− | FLVGYDFPSYIDAQA | 0 | — | 0 | — |
| | 89₇₇₂ | E−G− | KRWIKMSILNTAGSG | 1 | 107 | 3 | 136 |
| | 89₇₉₆ | E−G− | QYAKEIWGITANPVP | 2 | 105 | 3 | 99 |
| 90 | 90₃₃ | E−G− | KTLAVALGGARPLAT | 0 | — | 1 | 30 |
| | 90₄₅ | E−G− | LATRGVATFTLPDLP | 0 | — | 2 | 30 |
| | 90₅₆ | E−G− | PDLPYDYGALEPAIS | 2 | 37 | 1 | 67 |
| | 90₈₂ | E−G− | HATYVANYNKALEQL | 0 | — | 1 | 57 |
| | 90₁₀₃ | E−G− | GDASAVVQLQGAIKF | 0 | — | 0 | — |
| | 90₁₉₈ | E−G− | DPLVTKGANLIPLLG | 0 | — | 0 | 87 |
| | 90₂₀₅ | E−G− | ANLIPLLGIDVWEHA | 0 | — | 1 | 113 |
| | 90₂₁₈ | E−G− | HAYYLQYKNVRPDYL | 1 | 80 | 2 | 48 |
| | 90₂₂₉ | E−G− | PDYLTNIWKVVNWKY | 1 | 30 | 1 | 70 |
| 91 | 91₃₅ | E−G− | APSGRIVMELYADVV | 3 | 246 | 2 | 82 |
| | 91₄₁ | E−G− | VMELYADVVPKTAEN | 0 | — | 2 | 70 |
| | 91₇₄ | E−G− | HYKGSSFHRVIPGFM | 3 | 208 | 1 | 207 |
| | 91₁₀₄ | E−G− | SIYGAKFADENFIKK | 0 | — | 1 | 60 |
| | 91₁₃₅ | E−G− | NGSQFFLCTAKTAWL | 1 | 530 | 2 | 130 |
| 92 | 92₁ | E−G− | SQVHIRRPGGAGRDG | 0 | — | 1 | 113 |
| | 92₇ | E−G− | RPGGAGRDGGQLRIP | 0 | — | 1 | 130 |
| | 92₁₃ | E−G− | RDGGQLRIPSLLHGG | 0 | — | 1 | 97 |
| | 92₂₇ | E−G− | GHGCAQPAMERRKHI | 0 | — | 2 | 233 |
| | 92₃₈ | E−G− | RKHIEWNCDVCRHGD | 0 | — | 1 | 83 |
| 93 | 93₁ | E−G− | WTTVMRASCGHHRFR | 0 | — | 1 | 87 |
| | 93₁₃ | E−G− | RFRDCVISSLADFKL | 0 | — | 2 | 47 |
| | 93₁₉ | E−G− | ISSLADFKLFPVLQH | 0 | — | 1 | 67 |
| | 93₂₉ | E−G− | PVLQHIISIAVLAIF | 0 | — | 1 | 140 |
| | 93₃₅ | E−G− | ISIAVLAIFIGLLMI | 0 | — | 2 | 123 |

TABLE 5
Antibody reactivity and IL-5 production of NTGAs and NTGA-derived
peptides.

| | | Anti- | Anti- | | Pep- | Pep- | % | |
|---|---|---|---|---|---|---|---|---|
| | | gens | gens | % | tides | tides | posi- | Total |
| IgE | IgG | tested | positive | positive | tested | positive | tive | SFC |
| − | + | 24 | 14 | 58.3 | 173 | 46 | 26.6 | 6,154 |
| + | − | 13 | 9 | 69.2 | 118 | 33 | 28.0 | 1,796 |
| + | + | 16 | 12 | 75.0 | 187 | 93 | 49.7 | 7,229 |
| − | − | 30 | 17 | 56.7 | 256 | 68 | 26.6 | 7,628 |
| n.d. | n.d. | 10 | 2 | 20.0 | 88 | 10 | 11.4 | 1,053 |
| | | 93 | 54 | 64.8 | 822 | 250 | 28.4 | 23,860 |

TABLE 6
Epitopes tested positive for T Cell Recognition

| | | | | Total | | Total | |
|---|---|---|---|---|---|---|---|
| | | Antibody | | response | | response | |
| | | reactvity | | IL-5 | | IFNg | |
| Antigen | Peptide | IgE/IgG | Sequence | Events | SFC | Events | SFC |
| 1 | 1₁₆₁ | E+G+ | GNKQLVLPVPAFNVI | 0 | — | 1 | 190 |
| | 1₃₀₄ | E+G+ | VYKSFVSEYPIVSIE | 1 | 40 | 0 | — |
| | 1₃₄₂ | E+G+ | IVGDDLLVTNPTRVA | 0 | 0 | 1 | 193 |
| | 1₃₆₅ | E+G+ | NALLLKVNQIGSVTE | 1 | 40 | 1 | 170 |
| | 1₄₄₄ | E+G+ | LGAAAVYAGLKFRAP | 0 | — | 1 | 153 |
| 2 | 2₁ | E+G+ | AEFEGVFLDFARQQA | 2 | 58 | 0 | — |
| | 2₂₀ | E+G+ | VDKLFKLAEAAKLKE | 2 | 88 | 2 | 247 |
| | 2₄₉ | E+G+ | ENRSVLHVALRAPRD | 2 | 63 | 1 | 27 |
| | 2₁₁₆ | E+G+ | FLGPLFVHTALQTDP | 1 | 63 | 0 | — |
| | 2₁₃₉ | E+G+ | RQLRFLANVDPVDVA | 1 | 20 | 1 | 20 |
| | 2₁₆₈ | E+G+ | VVSKTFTTAETMLNA | 0 | — | 1 | 97 |
| | 2₁₉₈ | E+G+ | VSKHMIAVSTNLKLV | 2 | 80 | 1 | 20 |
| | 2₂₃₂ | E+G+ | RYSVCSAVGVLPLSL | 3 | 83 | 3 | 238 |
| | 2₂₃₈ | E+G+ | AVGVLPLSLQYGFPI | 3 | 71 | 4 | 121 |
| | 2₂₄₄ | E+G+ | LSLQYGFPIVQRFLE | 1 | 127 | 1 | 50 |
| | 2₂₅₀ | E+G+ | FPIVQRFLEGASSID | 2 | 92 | 1 | 90 |
| | 2₂₆₆ | E+G+ | HFRTASFEKNIPVLL | 1 | 33 | 0 | — |
| | 2₂₇₈ | E+G+ | VLLGLLSVWNVSFLG | 2 | 50 | 0 | — |
| | 2₂₈₄ | E+G+ | SVWNVSFLGYPARAI | 1 | 100 | 1 | 53 |
| | 2₂₉₅ | E+G+ | ARAILPYSQALEKLA | 1 | 120 | 1 | 27 |
| | 2₃₄₆ | E+G+ | NGQHSFYQLIHQGRV | 1 | 27 | 2 | 95 |
| | 2₃₆₃ | E+G+ | CDFIGVIKSQQPVYL | 2 | 98 | 2 | 238 |
| | 2₃₈₇ | E+G+ | ELMSNFFAQPDALAY | 2 | 102 | 3 | 99 |
| | 2₄₂₁ | E+G+ | KTFKGNRPSLSFLLS | 2 | 42 | 5 | 363 |
| | 2₄₂₈ | E+G+ | PSLSFLLSSLSAYEI | 1 | 67 | 1 | 53 |
| | 2₄₃₉ | E+G+ | AYEIGQLLAIYEHRI | 1 | 40 | 0 | — |
| | 2₄₄₅ | E+G+ | LLAIYEHRIAVQGFI | 1 | 77 | 2 | 42 |
| | 2₄₅₆ | E+G+ | QGFIWGINSFDQWGV | 1 | 113 | 0 | — |
| | 2₄₉₃ | E+G+ | PVEGFNPSSASLLAR | 1 | 143 | 1 | 47 |
| | 2₄₉₉ | E+G+ | PSSASLLARYLAVEP | 1 | 127 | 0 | — |
| 3 | 3₅₀ | E+G+ | LKDGSTYSFRFSFIV | 1 | 20 | 0 | — |
| 4 | 4₆ | E+G+ | MKTIFDFESIKKLLA | 0 | — | 1 | 43 |
| | 4₁₂ | E+G+ | FESIKKLLASPKFSF | 1 | 47 | 2 | 245 |
| | 4₄₁ | E+G+ | RMFVDELGASESSLL | 1 | 47 | 1 | 30 |
| | 4₇₀ | E+G+ | PNLTYAKELVERMGL | 0 | — | 1 | 33 |
| | 4₁₀₆ | E+G+ | RNMVLGKRFFVTPSD | 1 | 33 | 1 | 27 |
| | 4₁₂₉ | E+G+ | AVQSIPYFASGLKGV | 0 | — | 1 | 37 |
| | 4₂₀₃ | E+G+ | GIWAVLAWLSIIAYK | 0 | — | 1 | 107 |
| | 4₂₆₀ | E+G+ | KELMANLVKMQSALS | 1 | 327 | 1 | 97 |
| | 4₂₆₆ | E+G+ | LVKMQSALSDVNKLI | 2 | 35 | 0 | — |
| 5 | 5₂₇ | E+G+ | TVSDEYLAAVAKARR | 0 | — | 1 | 73 |
| 6 | 6₁ | E+G+ | TLLFPHTQISLPSVR | 2 | 32 | 0 | — |
| | 6₄₄ | E+G+ | DNEKSGFISLVSRYL | 2 | 38 | 0 | — |
| | 6₉₂ | E+G+ | EATKALLNKLAVLKL | 1 | 33 | 0 | — |
| | 6₁₂₃ | E+G+ | IEVRNGFTFLDLIVL | 1 | 27 | 0 | — |
| | 6₁₃₁ | E+G+ | FLDLIVLQIESLNKK | 1 | 33 | 0 | — |
| | 6₁₄₂ | E+G+ | LNKKYGSNVPLLLMN | 1 | 353 | 0 | — |
| | 6₁₄₉ | E+G+ | NVPLLLMNSFNTHED | 1 | 153 | 0 | — |
| | 6₁₆₅ | E+G+ | LKIVEKYANSSIDIH | 3 | 196 | 3 | 654 |
| | 6₁₇₅ | E+G+ | SIDIHTFNQSQYPRV | 2 | 113 | 1 | 243 |
| | 6₂₂₄ | E+G+ | GKLDLLLSQGKEYVF | 1 | 87 | 2 | 65 |
| | 6₂₃₃ | E+G+ | GKEYVFIANSDNLGA | 2 | 115 | 0 | — |
| | 6₂₄₂ | E+G+ | SDNLGAIVDMKILNH | 2 | 28 | 1 | 30 |
| | 6₂₄₈ | E+G+ | IVDMKILNHLIHKQN | 3 | 101 | 2 | 160 |
| | 6₂₈₈ | E+G+ | VQLLEIAQVPDAHVD | 1 | 73 | 0 | — |
| | 6₃₀₄ | E+G+ | FKSIEKFKIFNTNNL | 1 | 30 | 1 | 357 |
| | 6₃₁₀ | E+G+ | FKIFNTNNLWVNLKA | 2 | 60 | 0 | — |
| | 6₃₁₆ | E+G+ | NNLWVNLKAIKRLVE | 3 | 517 | 2 | 823 |
| | 6₃₂₅ | E+G+ | IKRLVEADALKMEII | 2 | 103 | 1 | 397 |
| | 6₃₄₈ | E+G+ | VKVLQLETAAGAAIR | 3 | 60 | 1 | 50 |
| | 6₃₅₉ | E+G+ | AAIRFFDHAIGINVP | 4 | 105 | 4 | 344 |
| | 6₃₆₉ | E+G+ | GINVPRSRFLPVKAT | 1 | 23 | 0 | — |
| | 6₃₇₆ | E+G+ | RFLPVKATSDLQLVQ | 2 | 60 | 1 | 83 |
| | 6₃₈₃ | E+G+ | TSDLQLVQSDLYTLV | 1 | 40 | 1 | 87 |
| | 6₃₈₉ | E+G+ | VQSDLYTLVDGFVTR | 2 | 82 | 1 | 60 |
| | 6₄₁₈ | E+G+ | GPEFKKVGSFLGRFK | 2 | 182 | 2 | 147 |
| | 6₄₂₉ | E+G+ | GRFKSIPSIVELDSL | 3 | 247 | 0 | — |
| 7 | 7₃₁ | E+G+ | GTIRNIINGTVFREP | 3 | 109 | 2 | 523 |
| | 7₁₀₁ | E+G+ | VFNFTGAGGVALAMY | 3 | 118 | 3 | 968 |
| | 7₁₂₁ | E+G+ | IQGFAEASMAIAYEK | 2 | 33 | 1 | 50 |
| | 7₁₂₇ | E+G+ | ASMAIAYEKKWPLYL | 2 | 52 | 1 | 80 |
| | 7₁₃₄ | E+G+ | EKKWPLYLSTKNTIL | 1 | 63 | 1 | 117 |
| | 7₁₅₃ | E+G+ | GRFKDIFQAVYEADW | 1 | 57 | 2 | 63 |
| | 7₁₇₇ | E+G+ | WYEHRLIDDMVAYAL | 1 | 43 | 0 | — |
| | 7₂₀₈ | E+G+ | VQSDFLAQGFGSLGL | 2 | 35 | 1 | 80 |
| | 7₂₆₀ | E+G+ | NSIASIFAWTRGLAH | 0 | — | 1 | 63 |
| | 7₂₈₀ | E+G+ | DNARLLDFTQKLEDA | 2 | 37 | 0 | — |
| | 7₃₀₄ | E+G+ | MTKDLALLVHGSSKV | 1 | 40 | 2 | 128 |
| | 7₃₂₄ | E+G+ | LNTEEFIDAVAAELQ | 3 | 60 | 3 | 92 |
| 8 | 8₃ | E+G+ | TIVASGIENMKIFTR | 0 | — | 1 | 293 |
| 9 | 9₅₆ | E+G+ | TDTIVYCAGRTFFFR | 0 | — | 1 | 180 |
| | 9₆₄ | E+G+ | GRTFFFRRLDAPLDA | 0 | — | 1 | 383 |
| | 9₁₅₂ | E+G+ | KSLVRAFMWDSGSTV | 0 | — | 0 | — |
| | 9₁₇₅ | E+G+ | RVLSCDFKPTRPFRI | 0 | — | 1 | 97 |
| | 9₃₅₅ | E+G+ | VSSLTYFPQSNPRTM | 1 | 23 | 0 | — |
| | 9₃₉₇ | E+G+ | TQIKCFVAAEEELIT | 1 | 20 | 0 | — |
| | 9₄₄₁ | E+G+ | NALNIAVQQPEFALI | 1 | 60 | 0 | — |
| | 9₄₅₀ | E+G+ | PEFALITTDSAIVLL | 1 | 33 | 0 | — |
| | 9₄₉₉ | E+G+ | KLRIYSISGDTLTEE | 0 | — | 1 | 53 |
| | 9₅₂₆ | E+G+ | IHYSPDVSMFASADA | 1 | 30 | 0 | — |
| | 9₅₅₄ | E+G+ | IKLKNMLFHTARINC | 1 | 33 | 1 | 20 |
| 10 | 10₁₀ | E+G+ | GRYFSKDAVQIITKM | 1 | 43 | 1 | 170 |
| | 10₁₆ | E+G+ | DAVQIITKMAAANGV | 1 | 160 | 1 | 83 |
| | 10₂₉ | E+G+ | GVRRVWVGQDSLLST | 0 | — | 2 | 30 |
| | 10₃₉ | E+G+ | SLLSTPAVSAIIRER | 1 | 37 | 2 | 30 |
| | 10₄₅ | E+G+ | AVSAIIRERIAADGS | 1 | 60 | 1 | 47 |
| 11 | 11₅₈ | E+G+ | SVGFVETLENDLAQL | 1 | 30 | 1 | 47 |
| | 11₁₁₁ | E+G+ | LGEAPYKFKSALEAV | 1 | 53 | 2 | 488 |
| | 11₁₁₇ | E+G+ | KFKSALEAVKTLRAE | 1 | 43 | 1 | 73 |
| | 11₁₃₇ | E+G+ | QYLPAFVIVDESGKS | 1 | 23 | 0 | — |
| | 11₁₆₁ | E+G+ | VVTFNFRADRMVMLA | 2 | 50 | 0 | — |
| | 11₁₆₈ | E+G+ | ADRMVMLAKALEFAD | 1 | 40 | 0 | — |
| | 11₂₀₆ | E+G+ | LKLPNKFLVSPPLIE | 1 | 30 | 0 | — |
| 12 | 12₅ | E+G+ | YKLLCSSFPVITYHQ | 2 | 60 | 0 | — |
| | 12₁₂ | E+G+ | FPVITYHQGRNGNLS | 1 | 103 | 0 | — |
| | 12₂₁ | E+G+ | RNGNLSALACPLNQK | 1 | 20 | 0 | — |
| 14 | 14₁ | E+G+ | LLGYLLWVVAIRRPR | 1 | 110 | 0 | — |
| 16 | 16₃ | E−G− | DEKLLSVFREGVVYG | 0 | — | 1 | 113 |
| | 16₂₁ | E−G− | GPGVYDIHSPRIPSK | 0 | — | 2 | 80 |
| | 16₃₆ | E−G− | EEIADDFALFRGTRP | 0 | — | 2 | 107 |
| | 16₄₂ | E−G− | FALFRGTRPPRRPKK | 0 | — | 1 | 97 |
| | 16₆₈ | E−G− | LCPGFCLADVTPETY | 0 | — | 2 | 45 |
| 17 | 17₂ | E+G+ | VCTRLSPFCCLYCIL | 2 | 52 | 0 | — |
| | 17₁₃ | E+G+ | YCILCCWYSMRLVTV | 1 | 63 | 0 | — |
| 20 | 20₂₉₄ | E+G− | DKPVVAFIAGLTAPP | 1 | 23 | 0 | — |
| | 20₃₂₉ | E+G− | KIKALREAGVTVVES | 1 | 23 | 0 | — |
| 22 | 22₁₃₁ | E+G− | QCAIIMFDVTSRLTY | 1 | 27 | 0 | — |
| | 22₂₀₆ | E+G− | KPFLYLARKLAGDAN | 2 | 88 | 1 | 603 |
| | 22₂₁₉ | E+G− | ANIHFVEAVALKPPE | 0 | — | 1 | 63 |
| | 22₂₄₅ | E+G− | EAELAAAAAQPLPDD | 1 | 20 | 0 | — |
| 23 | 23₁ | E+G− | RTSSWGSGASLKIDR | 1 | 27 | 0 | — |
| | 23₁₀ | E+G− | SLKIDRRELVTTRIY | 2 | 35 | 0 | — |
| 24 | 24₂₁ | E+G− | RFLHAAVAMATKRSV | 0 | — | 1 | 150 |
| | 24₄₄ | E+G− | KGKKVFLRADLNVPL | 1 | 30 | 3 | 234 |
| | 24₇₆ | E+G− | TIKFLLEKGAKVILA | 2 | 47 | 0 | — |
| | 24₈₂ | E+G− | EKGAKVILASHLGRP | 1 | 63 | 0 | — |
| | 24₁₀₉ | E+G− | VPRLSELLGVEVVMA | 2 | 70 | 2 | 118 |
| | 24₁₄₁ | E+G− | GGVLLLENVRFYKEE | 2 | 45 | 1 | 23 |
| | 24₁₆₀ | E+G− | PEFAKKLASVADLYV | 2 | 45 | 0 | — |
| | 24₁₉₃ | E+G− | KFLRPSVAGFLMQKE | 3 | 38 | 1 | 177 |
| | 24₁₉₉ | E+G− | VAGFLMQKELDYLVG | 1 | 90 | 0 | — |
| | 24₂₀₆ | E+G− | KELDYLVGAVANPKK | 1 | 37 | 1 | 143 |
| | 24₂₃₄ | E+G− | KIGVIESLLAKVDIL | 1 | 57 | 0 | — |
| | 24₂₅₃ | E+G− | GMIFTFYKAQGKAVG | 0 | — | 2 | 397 |
| | 24₂₇₂ | E+G− | EEDKLELATSLIETA | 2 | 52 | 1 | 23 |
| | 24₂₉₀ | E+G− | GVSLLLPTDVVVADK | 1 | 90 | 0 | — |
| 25 | 25₂ | E+G− | SAPALRILRSFPSHS | 1 | 97 | 1 | 143 |
| 26 | 26₁₃₈ | E+G− | KVINDRFGIVEGLMT | 0 | — | 1 | 37 |
| 27 | 27₇₆ | E+G− | LQHISGVILFEETLY | 1 | 53 | 0 | — |
| | 27₁₄₄ | E+G− | YEAGARFAKWRAVLK | 1 | 33 | 0 | — |
| | 27₁₇₅ | E+G− | GLARYAIICQENGLV | 2 | 33 | 1 | 140 |
| | 27₂₀₆ | E+G− | RCAYVTEVVLAACYK | 1 | 27 | 0 | — |
| | 27₂₂₃ | E+G− | NDQHVLLEGSLLKPN | 1 | 27 | 0 | — |
| | 27₃₀₀ | E+G− | WFLSFSFGRALQQST | 1 | 23 | 0 | — |
| 28 | 28₂ | E+G− | IPPAPHLKRWNRVVD | 1 | 127 | 0 | — |
| | 28₂₉ | E+G− | GAPFTGSGYRIAPYS | 1 | 107 | 0 | — |
| | 28₃₆ | E+G− | GYRIAPYSSILLKAT | 0 | — | 2 | 477 |
| 29 | 29₂ | E+G− | SFRFFLAHSSIHPST | 2 | 83 | 0 | — |
| | 29₁₀₆ | E+G− | TEKGIELILSTEIVK | 1 | 50 | 1 | 247 |
| | 29₁₂₄ | E+G− | ASKTLTSAAGATFTY | 1 | 30 | 0 | — |
| | 29₁₉₉ | E+G− | LELSAALKLNNFDVT | 1 | 133 | 0 | — |
| 30 | 30₂₈₅ | E+G− | VFNDDIQGTASVVLA | 1 | 67 | 0 | — |
| 32 | 32₄₁ | E−G+ | IEIDSLFEGIDFYST | 0 | — | 1 | 27 |
| | 32₅₀ | E−G+ | IDFYSTITRARFEEL | 1 | 20 | 0 | — |
| | 32₁₂₆ | E−G+ | EAVAYGAAVQAAILS | 0 | — | 1 | 30 |
| | 32₁₄₇ | E−G+ | VQDLLLLDVTPLSLG | 0 | — | 1 | 47 |
| 34 | 34₁₄₀ | E−G+ | KPIFHFVGTSTFSEY | 1 | 40 | 0 | — |
| | 34₃₄₉ | E−G+ | KFITHSVTFSEINKA | 1 | 50 | 1 | 103 |
| | 34₃₅₅ | E−G+ | VTFSEINKAFDLMAK | 0 | — | 1 | 103 |
| 35 | 35₁ | E−G+ | ALRWNLQMGHSVLPK | 1 | 47 | 0 | — |
| | 35₂₅ | E−G+ | NLDVYDWSIPDDLLA | 1 | 90 | 1 | 67 |
| | 35₃₅ | E−G+ | DDLLAKFSEIKQTRL | 1 | 30 | 0 | — |
| 39 | 39₁₁₁ | E−G+ | GESSEFVGDKVAYAL | 0 | — | 1 | 30 |
| | 39₁₁₈ | E−G+ | GDKVAYALAQGLKVI | 1 | 67 | 1 | 73 |
| 40 | 40₂ | E−G+ | VWQHDRVEIIANDQG | 1 | 40 | 0 | — |
| | 40₈ | E−G+ | VEIIANDQGNRTTPS | 1 | 27 | 0 | — |
| 41 | 41₁ | E−G+ | SSTRGWCSRRRAGRG | 0 | — | 0 | — |
| 42 | 42₆₉ | E−G+ | GVIAGLNVLRIINEP | 0 | — | 1 | 33 |
| 43 | 43₁₂₀ | E−G+ | YVVPWGFYKAVMHVK | 1 | 20 | 0 | — |
| | 43₁₉₁ | E−G+ | FAWSLLDNFEWRMGF | 1 | 27 | 0 | — |
| 46 | 46₃ | E−G+ | RGLLRRARGGPHHRR | 1 | 40 | 0 | — |
| | 46₁₉ | E−G+ | RGAHRRVPLRPLRHR | 0 | — | 1 | 60 |
| | 46₄₀ | E−G+ | EGRRAKLRSAGEVEI | 1 | 177 | 0 | — |
| | 46₅₀ | E−G+ | GEVEIQFRRVKCKYP | 4 | 60 | 0 | — |
| | 46₆₇ | E−G+ | TKVTFHVVGVGPLLH | 1 | 70 | 1 | 160 |
| 47 | 47₄₁ | E−G+ | GKFAAERGAFTVVLS | 1 | 30 | 0 | — |
| | 47₄₉ | E−G+ | AFTVVLSGGTLIDTL | 1 | 43 | 0 | — |
| | 47₉₆ | E−G+ | DSNYKLAVDGLLSKV | 1 | 53 | 0 | — |
| | 47₁₃₅ | E−G+ | TVLKQLVKSGVLAMS | 2 | 22 | 0 | — |
| | 47₁₄₂ | E−G+ | KSGVLAMSTATGFPR | 1 | 40 | 0 | — |
| 48 | 48₂₆₉ | E−G+ | YAVGQKIKAYLEAES | 0 | — | 1 | 297 |
| 49 | 49₁ | E−G+ | ELRKTYNLLDAVSRH | 4 | 847 | 1 | 100 |
| | 49₁₈ | E−G+ | QVYPRSWSAVMLTFD | 2 | 602 | 0 | — |
| | 49₂₆ | E−G+ | AVMLTFDNAGMWNVR | 3 | 899 | 1 | 503 |
| | 49₄₂ | E−G+ | NVWERHYLAGEMTLM | 1 | 130 | 0 | — |
| | 49₅₀ | E−G+ | GEQLYISVISPARSL | 0 | — | 1 | 80 |
| 50 | 50₄₄ | E−G+ | IGNLRLDNTTLIDKD | 1 | 40 | 0 | — |
| | 50₈₈ | E−G+ | EIPMIQNILSRSQIF | 0 | — | 2 | 158 |
| | 50₉₂ | E−G+ | SRSQIFDGIPNLMSL | 0 | — | 1 | 87 |
| | 50₁₀₃ | E−G+ | DGIPNLMSLDNVVKI | 0 | — | 2 | 158 |
| | 50₁₅₀ | E−G+ | EFPVTWVSSPEVALL | 0 | — | 1 | 97 |
| | 50₁₅₈ | E−G+ | SPEVALLKSLAGKLR | 1 | 27 | 1 | 87 |
| | 50₁₇₄ | E−G+ | STKLIFRFLREDLVE | 1 | 30 | 0 | — |
| | 50₁₉₆ | E−G+ | GELLKDLKSIKAFAS | 0 | — | 1 | 43 |
| 51 | 51₂₁ | E−G+ | LLETHLVPSSTAPES | 0 | — | 1 | 47 |
| | 51₃₃ | E−G+ | PESKVFYLKMKGDYH | 1 | 27 | 1 | 53 |
| | 51₆₇ | E−G+ | MNSYKAAQDIALADL | 0 | — | 1 | 43 |
| 52 | 52₁ | E−G+ | LLGLLAPLASAQLSR | 0 | — | 1 | 33 |
| | 52₂₃ | E−G+ | PDAEKIVAAVIEKKL | 1 | 20 | 0 | — |
| | 52₄₅ | E−G+ | AGLLRLLFHDCFANG | 1 | 113 | 1 | 37 |
| | 52₆₀ | E−G+ | CDASILIDPLSNQSA | 3 | 91 | 5 | 151 |
| | 52₂₂₉ | E−G+ | IDSSYFANVLAKKMP | 1 | 50 | 1 | 50 |
| | 52₂₆₆ | E−G+ | KPNDFMPTFAKAMEK | 0 | — | 1 | 33 |
| | 52₂₇₂ | E−G+ | PTFAKAMEKLSVLKV | 2 | 53 | 2 | 62 |
| | 52₃₀₉ | E−G+ | GGSVIRISSANPEDL | 1 | 70 | 2 | 72 |
| 53 | 53₁ | E−G+ | WSEIQTLKPNLIGPF | 0 | — | 1 | 103 |
| | 53₅₇ | E−G+ | AAYLATRGLDVVDAV | 1 | 880 | 1 | 1030 |
| | 53₆₄ | E−G+ | GLDVVDAVSNALIKS | 1 | 23 | 0 | — |
| | 53₈₄ | E−G+ | TKQQVFIQSEDPPVL | 3 | 42 | 0 | — |
| | 53₉₆ | E−G+ | PVLSAFKKFPKFNRV | 1 | 53 | 0 | — |
| | 53₁₀₃ | E−G+ | KFPKFNRVFEIEFDI | 1 | 30 | 3 | 499 |
| | 53₁₂₆ | E−G+ | VEIKEFANAVKLRRS | 1 | 87 | 1 | 797 |
| | 53₁₃₅ | E−G+ | VKLRRSSAAQVDGFY | 3 | 104 | 0 | — |
| | 53₁₇₀ | E−G+ | GVLKNEFMSLAFDYW | 1 | 83 | 0 | — |
| | 53₂₀₂ | E−G+ | GLVTEFPSTAAAYFR | 1 | 63 | 1 | 153 |
| 54 | 54₃₉ | E−G+ | NIVVNVFNQLDQPLL | 1 | 43 | 0 | — |
| | 54₉₃ | E−G+ | IGSFFYFPSIGMQRT | 5 | 447 | 4 | 183 |
| | 54₁₁₆ | E−G+ | VVSRLLIPVPFDPPA | 1 | 307 | 1 | 133 |
| 55 | 55₄₀ | E−G− | IGEIKGFADAVMVSR | 0 | — | 1 | 167 |
| | 55₆₀ | E−G− | VNGFFLTGFNDLVTE | 0 | — | 1 | 903 |
| 56 | 56₂₁ | E−G− | KIASFLDPDGWKVVL | 0 | — | 1 | 343 |
| 59 | 59₇₅ | E−G− | FLQQAKALLRPDFAV | 0 | — | 1 | 33 |
| | 59₈₁ | E−G− | ALLRPDFAVAAQNCW | 0 | — | 1 | 23 |
| | 59₁₀₆ | E−G− | ISAEMLVNLQVPWVI | 0 | — | 1 | 37 |
| | 59₁₃₈ | E−G− | ADKVAYALAQGLKVI | 1 | 47 | 2 | 45 |
| | 59₁₆₆ | E−G− | TTMEVVAAQTKAIAE | 0 | — | 1 | 23 |
| | 59₁₈₅ | E−G− | WTNVVLAYEPVWAIG | 1 | 20 | 0 | — |
| | 59₂₁₆ | E−G− | LRKWLHANVGPAVAE | 0 | — | 2 | 138 |
| | 59₂₆₆ | E−G− | PEFVDIIKSATVKSS | 0 | — | 1 | 137 |
| 61 | 61₁₉ | E−G− | KVSKVLNTYIFLLYL | 1 | 27 | 0 | — |
| 62 | 62₁₁ | E−G− | YQPAAMRRLSLILLA | 1 | 63 | 0 | — |
| | 62₁₄₀ | E−G− | CADILAIASRVLVTM | 1 | 43 | 0 | — |
| | 62₁₈₅ | E−G− | NFTVGRIIELFTAKG | 4 | 200 | 6 | 223 |
| | 62₁₉₁ | E−G− | IIELFTAKGFTVQEM | 2 | 298 | 4 | 179 |
| | 62₂₀₀ | E−G− | FTVQEMVALSGAHTL | 0 | — | 1 | 537 |
| | 62₂₇₆ | E−G− | FDNIYSVNIERGLGL | 0 | — | 1 | 73 |
| 63 | 63₁₁ | E−G− | ILLLLHGANAALDEP | 0 | — | 1 | 47 |
| | 63₁₁₄ | E−G− | IHGWFAVDFTAAELV | 1 | 120 | 2 | 227 |
| 64 | 64₁₁₁ | E−G− | KNPLKFDNTYFTELL | 1 | 100 | 1 | 47 |
| 65 | 65₂₂ | E−G− | FSCDSAYQVTYIVRG | 1 | 23 | 1 | 47 |
| | 65₂₈ | E−G− | YQVTYIVRGSGRVQV | 1 | 87 | 1 | 367 |
| | 65₅₅ | E−G− | IEGGSLFIVPRFHVV | 1 | 130 | 1 | 113 |
| 72 | 72₂₉₁ | n.d. | DAYICAIRRAKSFIY | 1 | 40 | 1 | 77 |
| | 72₄₃₃ | n.d. | DYLKAQQNRRFMIYV | 1 | 190 | 1 | 33 |
| 73 | 73₃₂₆ | n.d. | DVLREPHLYTFSFRN | 1 | 77 | 0 | — |
| | 73₃₄₃ | n.d. | LEVTEVFNFSQDDLL | 1 | 63 | 0 | — |
| | 73₃₄₀ | n.d. | FNFSQDDLLTEDVMI | 1 | 90 | 0 | — |
| | 73₆₆₀ | n.d. | SRSFLKHSLLRTQRL | 1 | 73 | 0 | — |
| | 73₆₆₆ | n.d. | HSLLRTQRLHKFLVC | 1 | 87 | 0 | — |
| | 73₆₇₄ | n.d. | LHKFLVCSSMIGVMA | 0 | — | 0 | — |
| | 73₆₉₄ | n.d. | SGNLVMFQMQDHQLI | 1 | 157 | 0 | — |
| | 73₇₀₆ | n.d. | QLIYPLISPSFLVYS | 1 | 200 | 0 | — |
| | 73₇₁₂ | n.d. | ISPSFLVYSFFVHDL | 1 | 77 | 0 | — |
| 76 | 76₁₁ | E−G− | NIWADDLAASLSTLE | 0 | — | 1 | 390 |
| | 76₁₇ | E−G− | IAIAFLSVSNNYEYI | 1 | 47 | 0 | — |
| | 76₄₀ | E−G− | TSCSLMHTAVDLVNE | 1 | 160 | 0 | — |
| | 76₅₅ | E−G− | TKLDSEIKSWLAFAA | 1 | 200 | 1 | 323 |
| | 76₈₅ | E−G− | LKDEAYFAANAAAQA | 1 | 203 | 1 | 153 |
| | 76₂₅₀ | E−G− | NPMTVFWSKMAQSMT | 2 | 138 | 0 | — |
| 77 | 77₁₈₈ | E−G− | SPPVVSFRETVLDKS | 1 | 107 | 0 | — |
| | 77₂₁₂ | E−G− | NKHNRLYMEARPLEE | 1 | 107 | 0 | — |
| | 77₄₀₃ | E−G− | LPVIESFGFSATLRA | 0 | — | 1 | 333 |
| 78 | 78₈₅ | E−G− | ELAEMEVSAAFHLFS | 0 | — | 2 | 217 |
| | 78₁₄₃ | E−G− | KISLSKVRSFLTEAK | 0 | — | 1 | 783 |
| 79 | 79₁₃₂ | E−G− | QQYTAALSPILFECL | 1 | 183 | 0 | — |
| | 79₁₃₈ | E−G− | LSPILFECLIHPMLG | 1 | 83 | 0 | — |
| | 79₁₆₀ | E−G− | VEDNLVKLKNVLNVY | 1 | 100 | 0 | — |
| | 79₁₁ | E−G− | EVYEARLTKFKYLAG | 0 | — | 1 | 47 |
| | 79₁₈ | E−G− | TKFKYLAGDYLSLAD | 1 | 37 | 0 | — |
| | 79₅₇ | E−G− | VKAWWTDLLAKPSVQ | 1 | 100 | 1 | 23 |
| 80 | 80₁ | E−G− | KLRFTCLSSTGSSCL | 1 | 133 | 0 | — |
| | 80₇ | E−G− | LSSTGSSCLFVLILF | 1 | 147 | 1 | 63 |
| 81 | 81₁ | E−G− | EKLKKVLEVYEARLS | 2 | 100 | 0 | — |
| | 81₁₈ | E−G− | SYLAGDFVSFADLNH | 1 | 40 | 0 | — |
| 82 | 82₁₀₉ | E−G− | GDLYIFESRAICKYA | 1 | 290 | 0 | — |
| 83 | 83₅ | E−G− | ACSLFLNYAVSFNYF | 1 | 57 | 0 | — |
| | 83₁₂ | E−G− | YAVSFNYFVCNLLQE | 1 | 70 | 1 | 37 |
| | 83₂₂ | E−G− | NLLQERLKKLKSEHG | 1 | 83 | 1 | 47 |
| | 83₅₄ | E−G− | GMTGMLWETSLLDPE | 1 | 107 | 0 | — |
| | 83₉₆ | E−G− | PEGLLWLLLTGKVPT | 1 | 93 | 1 | 33 |
| | 83₁₈₆ | E−G− | IARLPQVASYVYRRI | 1 | 187 | 1 | 33 |
| | 83₂₀₉ | E−G− | ADNSLDYAANFSHML | 1 | 130 | 1 | 53 |
| | 83₂₂₇ | E−G− | DPKMLELMRLYITIH | 1 | 63 | 1 | 40 |
| | 83₂₆₀ | E−G− | ALSDPYLSFAAALNG | 1 | 130 | 1 | 70 |
| | 83₂₆₆ | E−G− | LSFAAALNGLAGPLH | 1 | 103 | 0 | — |
| | 83₃₀₆ | E−G− | QLKEYVWKTLKSGKV | 1 | 90 | 1 | 40 |
| | 83₃₄₉ | E−G− | EDPLFQLVSKLYEVV | 1 | 160 | 0 | — |
| | 83₃₅₅ | E−G− | LVSKLYEVVPGILTE | 1 | 207 | 0 | — |
| | 83₃₈₄ | E−G− | SGVLLNHFGLVEARY | 1 | 140 | 0 | — |
| | 83₄₀₀ | E−G− | TVLFGVSRSMGIGSQ | 1 | 123 | 0 | — |
| | 83₄₁₂ | E−G− | GSQLIWDRALGLPLE | 1 | 37 | 1 | 57 |
| 84 | 84₁₀ | E−G− | GPVTILNWSFVRNDQ | 1 | 47 | 0 | — |
| | 84₆₉ | E−G− | EHAFYLDWAVHSFRI | 1 | 53 | 1 | 303 |
| | 84₁₀₃ | E−G− | FNDIIHSIINMDADV | 1 | 50 | 0 | — |
| | 84₁₆₅ | E−G− | VNKMLAVLDTNILWV | 1 | 47 | 0 | — |
| 86 | 86₂₃₁ | E−G− | IMQLLRDNLTLWTSD | 0 | — | 1 | 73 |
| 89 | 89₂₁ | E−G− | EPAYFATAESVRDHL | 1 | 37 | 0 | — |
| | 89₅₃ | E−G− | QTYYLSMEYLQGRAL | 1 | 37 | 0 | — |
| | 89₈₁ | E−G− | AEAVKKFGYELEALA | 1 | 33 | 0 | — |
| | 89₁₃₁ | E−G− | LRYRYGLFKQRIAKE | 0 | — | 1 | 663 |
| | 89₁₉₁ | E−G− | GEVLNALAYDVPIPG | 2 | 288 | 1 | 1247 |
| | 89₄₆₀ | E−G− | PRRWLRFCNPELSEI | 1 | 240 | 1 | 153 |
| | 89₅₄₀ | E−G− | IKRIHEYKRQLMNIL | 0 | — | 2 | 45 |
| | 89₅₄₆ | E−G− | YKRQLMNILGAVYRY | 2 | 78 | 1 | 43 |
| | 89₅₅₄ | E−G− | LGAVYRYKKLKEMSA | 3 | 54 | 1 | 43 |
| | 89₅₈₃ | E−G− | GKAFATYTNAKRIVK | 2 | 68 | 0 | — |
| | 89₅₉₃ | E−G− | KRIVKLVNDVGAVVN | 1 | 77 | 2 | 195 |
| | 89₆₁₂ | E−G− | VNKYLKVVFIPNYNV | 0 | — | 1 | 213 |
| | 89₆₁₉ | E−G− | VFIPNYNVSVAEVLI | 2 | 28 | 6 | 259 |
| | 89₆₈₁ | E−G− | EDNFFLFGAKADQVA | 2 | 35 | 2 | 202 |
| | 89₇₇₂ | E−G− | KRWIKMSILNTAGSG | 1 | 107 | 3 | 136 |
| | 89₇₉₆ | E−G− | QYAKEIWGITANPVP | 2 | 105 | 3 | 99 |
| 90 | 90₃₃ | E−G− | KTLAVALGGARPLAT | 0 | — | 1 | 30 |
| | 90₄₅ | E−G− | LATRGVATFTLPDLP | 0 | — | 2 | 30 |
| | 90₅₆ | E−G− | PDLPYDYGALEPAIS | 2 | 37 | 1 | 67 |
| | 90₈₂ | E−G− | HATYVANYNKALEQL | 0 | — | 1 | 57 |
| | 90₁₉₈ | E−G− | DPLVTKGANLIPLLG | 0 | — | 0 | 87 |
| | 90₂₀₅ | E−G− | ANLIPLLGIDVWEHA | 0 | — | 1 | 113 |
| | 90₂₁₈ | E−G− | HAYYLQYKNVRPDYL | 1 | 80 | 2 | 48 |
| | 90₂₂₉ | E−G− | PDYLTNIWKVVNWKY | 1 | 30 | 1 | 70 |
| 91 | 91₃₅ | E−G− | APSGRIVMELYADVV | 3 | 246 | 2 | 82 |
| | 91₄₁ | E−G− | VMELYADVVPKTAEN | 0 | — | 2 | 70 |
| | 91₇₄ | E−G− | HYKGSSFHRVIPGFM | 3 | 208 | 1 | 207 |
| | 91₁₀₄ | E−G− | SIYGAKFADENFIKK | 0 | — | 1 | 60 |
| | 91₁₃₅ | E−G− | NGSQFFLCTAKTAWL | 1 | 530 | 2 | 130 |
| 92 | 92₁ | E−G− | SQVHIRRPGGAGRDG | 0 | — | 1 | 113 |
| | 92₇ | E−G− | RPGGAGRDGGQLRIP | 0 | — | 1 | 130 |
| | 92₁₃ | E−G− | RDGGQLRIPSLLHGG | 0 | — | 1 | 97 |
| | 92₂₇ | E−G− | GHGCAQPAMERRKHI | 0 | — | 2 | 233 |
| | 92₃₈ | E−G− | RKHIEWNCDVCRHGD | 0 | — | 1 | 83 |
| 93 | 93₁ | E−G− | WTTVMRASCGHHRFR | 0 | — | 1 | 87 |
| | 93₁₃ | E−G− | RFRDCVISSLADFKL | 0 | — | 2 | 47 |
| | 93₁₉ | E−G− | ISSLADFKLFPVLQH | 0 | — | 1 | 67 |
| | 93₂₉ | E−G− | PVLQHIISIAVLAIF | 0 | — | 1 | 140 |
| | 93₃₅ | E−G− | ISIAVLAIFIGLLMI | 0 | — | 2 | 123 |

### REFERENCES

[0273] 1. Brozek J L, et al. (2010) Allergic Rhinitis and its Impact on Asthma (ARIA) guidelines: 2010 revision. J Allergy Clin Immunol 126(3):466-476.
[0274] 2. Nathan R A (2007) The burden of allergic rhinitis. Allergy Asthma Proc 28(1):3-9.
[0275] 3. Bauchau V & Durham SR (2004) Prevalence and rate of diagnosis of allergic rhinitis in Europe. Eur Respir J 24(5):758-764.
[0276] 4. Rolland J M, Douglass J, & O'Hehir R E (2000) Allergen immunotherapy: current and new therapeutic strategies. Expert Opin Investig Drugs 9(3):515-527.
[0277] 5. Laprise C & Boulet L P (1996) Airway responsiveness and atopy in families of patients with asthma. Clin Invest Med 19(6):461-469.
[0278] 6. Romagnani S (2000) The role of lymphocytes in allergic disease. J Allergy Clin Immunol 105(3):399-408.
[0279] 7. Andersson K & Lidholm J (2003) Characteristics and immunobiology of grass pollen allergens. Int Arch Allergy Immunol 130(2):87-107.
[0280] 8. Basketter D A & Kimber I (2011) Assessing the potency of respiratory allergens: uncertainties and challenges. Regul Toxicol Pharmacol 61(3):365-372.
[0281] 9. Gieras A, et al. (2007) Molecular determinants of allergen-induced effector cell degranulation. J Allergy Clin Immunol 119(2):384-390.
[0282] 10. Vijayanand P, et al. (2012) Interleukin-4 production by follicular helper T cells requires the conserved 114 enhancer hypersensitivity site V. Immunity 36(2):175-187.
[0283] 11. Mehlhop P D, et al. (1997) Allergen-induced bronchial hyperreactivity and eosinophilic inflammation occur in the absence of IgE in a mouse model of asthma. Proc Natl Acad Sci USA 94(4):1344-1349.
[0284] 12. Oseroff C, et al. (2010) Molecular determinants of T cell epitope recognition to the common Timothy grass allergen. J Immunol 185(2):943-955.
[0285] 13. Benitez D, et al. (2001) Specific immune response to Phleum pratense plant profilin in atopic patients and control subjects. Allergol Immunopathol (Madr) 29(1):9-15.
[0286] 14. Wurtzen P A, van Neerven R J, Arnved J, Ipsen H, & Sparholt S H (1998) Dissection of the grass allergen-specific immune response in patients with allergies and control subjects: T-cell proliferation in patients does not correlate with specific serum IgE and skin reactivity. J Allergy Clin Immunol 101(2 Pt 1):241-249.
[0287] 15. Oseroff C, et al. (2012) T Cell Responses to Known Allergen Proteins Are Differently Polarized and Account for a Variable Fraction of Total Response to Allergen Extracts. J Immunol.
[0288] 16. Oseroff C, et al. (2012) Analysis of T Cell Responses to the Major Allergens from German Cockroach: Epitope Specificity and Relationship to IgE Production. J Immunol 189(2):679-688.
[0289] 17. Sette A, et al. (2008) Selective CD4+ T cell help for antibody responses to a large viral pathogen: deterministic linkage of specificities. Immunity 28(6):847-858.
[0290] 18. Lanzavecchia A (1985) Antigen-specific interaction between T and B cells. Nature 314(6011):537-539.
[0291] 19. Chen C, et al. (2011) Identification of CD4+ T cell epitopes in C. burnetii antigens targeted by antibody responses. PLoS One 6(3):e17712.
[0292] 20. Chain B M, Mitchison N A, Mitchison T J, Davies D H, & Marcinkiewicz J (1989) Antigen processing: current issues, exceptional cases (Thy 1 alloantigen, MHC class-II-restricted cytolytic T cells), and implications for vaccine development. J Autoimmun 2 Suppl:45-53.
[0293] 21. Wang P, et al. (2008) A systematic assessment of MHC class II peptide binding predictions and evaluation of a consensus approach. PLoS Comput Biol 4(4):e1000048.
[0294] 22. Wang P, et al. (2010) Peptide binding predictions for HLA DR, DP and DQ molecules. BMC Bioinformatics 11:568.
[0295] 23. Lowenstein H (1978) Quantitative immunoelectrophoretic methods as a tool for the analysis and isolation of allergens. Prog Allergy 25:1-62.
[0296] 24. Chapman M D (2008) Allergen nomenclature. Clin Allergy Immunol 21:47-58.
[0297] 25. Petersen A, Schramm G, Schlaak M, & Becker W M (1998) Post-translational modifications influence IgE reactivity to the major allergen Phl p 1 of timothy grass pollen. Clin Exp Allergy 28(3):315-321.
[0298] 26. Schuhbauer D M, Mitchison N A, & Mueller B (2000) Interaction within clusters of dendritic cells and helper T cells during initial Th1/Th2 commitment. Eur J Immunol 30(5):1255-1262.
[0299] 27. Wachholz P A & Durham S R (2004) Mechanisms of immunotherapy: IgG revisited. Curr Opin Allergy Clin Immunol 4(4):313-318.
[0300] 28. Skripak J M, et al. (2008) A randomized, double-blind, placebo-controlled study of milk oral immunotherapy for cow's milk allergy. J Allergy Clin Immunol 122(6):1154-1160.
[0301] 29. Cady C T, et al. (2010) IgG antibodies produced during subcutaneous allergen immunotherapy mediate inhibition of basophil activation via a mechanism involving both FcgammaRIIA and FcgammaRIIB. Immunol Lett 130(1-2):57-65.
[0302] 30. Terada T, Zhang K, Belperio J, Londhe V, & Saxon A (2006) A chimeric human-cat Fcgamma-Fel d1 fusion protein inhibits systemic, pulmonary, and cutaneous allergic reactivity to intratracheal challenge in mice sensitized to Fel d1, the major cat allergen. Clin Immunol 120(1):45-56.
[0303] 31. Wallner M, et al. (2009) Immunologic characterization of isoforms of Car b 1 and Que a 1, the major hornbeam and oak pollen allergens. Allergy 64(3):452-460.
[0304] 32. Zerbino D R & Birney E (2008) Velvet: algorithms for de novo short read assembly using de Bruijn graphs. Genome Res 18(5):821-829.
[0305] 33. Hannon G J (2010) FASTX-Toolkit http://hannonlab.cshl.edu/fastx_toolkit/%3E.
[0306] 34. Surget-Groba Y & Montoya-Burgos J I (2010) Optimization of de novo transcriptome assembly from next-generation sequencing data. Genome Res 20(10):1432-1440.1.

The application's sequence listing, which the Patent Office published only in electronic form, follows.

SEQUENCE LISTING (2264 sequences)

SEQ ID NO: 1 - protein, 390 aa, Phleum pratense
SDYLGKGVLKAVDNVNSIIGPALIGKDPTEQTELDNFMVHQLDGTKNEWGWCKQKLGANAILAVSLAVCKAGALVKKIPLYQHIANLAGNKQLVLPVPAFNVINGGSHAGNKLAMQEFMILPTGASSFKEAMKMGVEVYHNLKSVIKKKYGQDATNVGDEGGFAPNIQENKEGLELLKTAIEKAGYTGKVVIGMDVAASEFYGEKDQTYDLNFKEENNDGSQKISGDSLKNVYKSFVSEYPIVSIEDPFDQDDWVHYAKMTEEIGEQVQIVGDDLLVTNPTRVAKAIAEKSCNALLLKVNQIGSVTESIEAVKMSKRAGWGGMTSHRSGETEDTFIADLAVGLSTGQIKTGAPCRSERLAKYNQLLRIEEELGAAAVYAGLKFRAPVEPY

SEQ ID NO: 2 - protein, 389 aa, Phleum pratense
DYLGKGVLKAVDNVNSIIGPALIGKDPTEQTELDNFMVHQLDGTKNEWGWCKQKLGANAILAVSLAVCKAGALVKKIPLYQHIANLAGNKQLVLPVPAFNVINGGSHAGNKLAMQEFMILPTGASSFKEAMKMGVEVYHNLKSVIKKKYGQDATNVGDEGGFAPNIQENKEGLELLKTAIEKAGYTGKVVIGMDVAASEFYGEKDQTYDLNFKEENNDGSQKISGDSLKNVYKSFVSEYPIVSIEDPFDQDDWVHYAKMTEEIGEQVQIVGDDLLVTNPTRVAKAIAEKSCNALLLKVNQIGSVTESIEAVKMSKRAGWGVMTSHRSGETEDTFIADLAVGLSTGQIKTGAPCRSERLAKYNQLLRIEEELGAAAVYAGLKFRAPVEPY

SEQ ID NO: 3 - protein, 65 aa, Phleum pratense
GNPTVEVDVCCSDGTFARAAVPSGASTGVYEALELRDGGSDYLGKGVLKGNRANVELFHIAVLLA

SEQ ID NO: 4 - protein, 446 aa, Phleum pratense
PPPPAMAATIQSVKARQIFDSRGNPTVEVDVCCSDGTFARAAVPSGASTGVYEALELRDGGSDYLGKGVLKAVDNVNSIIGPALIGKDPTEQTELDNFMVHQLDGTKNEWGWCKQKLGANAILAVSLAVCKAGALVKKIPLYQHIANLAGNKQLVLPVPAFNVINGGSHAGNKLAMQEFMILPTGASSFKEAMKMGVEVYHNLKSVIKKKYGQDATNVGDEGGFAPNIQENKEGLELLKTAIEKAGYTGKVVIGMDVAASEFYGEKDQTYDLNFKEENNDGSQKISGDSLKNVYKSFVSEYPIVSIEDPFDQDDWVHYAKMTEEIGEQVQIVGDDLLVTNPTRVAKAIAEKSCNALLLKVNQIGSVTESIEAVKMSKRAGWGGMTSHRSGETEDTFIADLAVGLSTGQIKTGAPCRSERLAKYNQLLRIEEELGAAAVYAGLKFRA

SEQ ID NO: 5 - protein, 429 aa, Phleum pratense
GNPTVEVDVCCSDGTFARAAVPSGASTGVYEALELRDGGSDYLGKGVLKAVDNVNSIIGPALLGKDPTEQTELDNFMVHQLDGTKNEWGWCKQKLGANAILAVSLAVCKAGALVKKIPLYQHIANLAGNKQLVLPVPAFNVINGGSHAGNKLAMQEFMILPTGASSFKEAMKMGVEVYHNLKSVIKKKYGQDATNVGDEGGFAPNIQENKEGLELLKTAIEKAGYTGKVVIGMDVAASEFYGEKDQTYDLNFKEENNDGSQKISGDSLKNVYKSFVSEYPIVSIEDPFDQDDWVHYAKMTEEIGEQVQIVGDDLLVTNPTRVAKAIAEKSCNALLLKVNQIGSVTESIEAVKMSKRAGWGVMTSHRSGETEDTFIADLAVGLSTGQIKTGAPCRSERLAKYNQLLRIEEELGAAAVYAGLKFRAPVEPY

SEQ ID NO: 6 - protein, 389 aa, Phleum pratense
DYLGKGVLKAVDNVNSIIGPALLGKDPTEQTELDNFMVHQLDGTKNEWGWCKQKLGANAILAVSLAVCKAGALVKKIPLYQHIANLAGNKQLVLPVPAFNVINGGSHAGNKLAMQEFMILPTGASSFKEAMKMGVEVYHNLKSVIKKKYGQDATNVGDEGGFAPNIQENKEGLELLKTAIEKAGYTGKVVIGMDVAASEFYGEKDQTYDLNFKEENNDGSQKISGDSLKNVYKSFVSEYPIVSIEDPFDQDDWVHYAKMTEEIGEQVQIVGDDLLVTNPTRVAKAIAEKSCNALLLKVNQIGSVTESIEAVKMSKRAGWGVMTSHRSGETEDTFIADLAVGLSTGQIKTGAPCRSERLAKYNQLLRIEEELGAAAVYAGLKFRAPVEPY

SEQ ID NO: 7 - protein, 301 aa, Phleum pratense
ANLAGNKQLVLPVPAFNVINGGSHAGNKLAMQEFMILPTGASSFKEAMKMGVEVYHNLKSVIKKKYGQDATNVGDEGGFAPNIQENKEGLELLKTAIEKAGYTGKVVIGMDVAASEFYGEKDQTYDLNFKEENNDGSQKISGDSLKNVYKSFVSEYPIVSIEDPFDQDDWVHYAKMTEEIGEQVQIVGDDLLVTNPTRVAKAIAEKSCNALLLKVNQIGSVTESIEAVKMSKRAGWGVMTSHRSGETEDTFIADLAVGLSTGQIKTGAPCRSERLAKYNQLLRIEEELGAAAVYAGLKFRA

SEQ ID NO: 8 - protein, 164 aa, Phleum pratense
LRFPKASRSIPPPPAMAATIQSVKARQIFDSRGNPTVEVDVCCSDGTFARAAVPSGASTGVYEALELRDGGSDYLGKGVLKAVDNVNSIIGPALLGKDPTEQTELDNFMVHQLDGTKNEWGWCKQKLGANAILAVSLAVCKAGALVKKIPLYQHIANLAGNKQL

SEQ ID NO: 9 - protein, 401 aa, Phleum pratense
RSIPPPPPAMAATIQSVKARQIFDSRGNPTVEVDVCCSDGTFARAAVPSGASTGVYEALELRDGGSDYLGKGVLKAVDNVNSIIGPALLGKDPTEQTELDNFMVHQLDGTKNEWGWCKQKLGANAILAVSLAVCKAGALVKKIPLYQHIANLAGNKQLVLPVPAFNVINGGSHAGNKLAMQEFMILPTGASSFKEAMKMGVEVYHNLKSVIKKKYGQDATNVGDEGGFAPNIQENKEGLELLKTAIEKAGYTGKVVIGMDVAASEFYGEKDQTYDLNFKEENNDGSQKISGDSLKNVYKSFVSEYPIVSIEDPFDQDDWVHYAKMTEEIGEQVQIVGDDLLVTNPTRVAKAIAEKSCNALLLKVNQIGSVTESIEAVKMSKRAGWGVMTSHRSGETEDTFI

SEQ ID NO: 10 - protein, 352 aa, Phleum pratense
SDYLGKGVLKAVDNVNSIIGPALIGKDPTEQTELDNFMVHQLDGTKNEWGWCKQKLGANAILAVSLAVCKAGALVKKIPLYQHIANLAGNKQLVLPVPAFNVINGGSHAGNKLAMQEFMILPTGASSFKEAMKMGVEVYHNLKSVIKKKYGQDATNVGDEGGFAPNIQENKEGLELLKTAIEKAGYTGKVVIGMDVAASEFYGEKDQTYDLNFKEENNDGSQKISGDSLKNVYKSFVSEYPIVSIEDPFDQDDWVHYAKMTEEIGEQVQIVGDDLLVTNPTRVAKAIAEKSCNALLLKVNQIGSVTESIEAVKMSKRAGWGVMTSHRSGETEDTFIADLAVGLSTGQIKTGA

SEQ ID NO: 11 - protein, 160 aa, Phleum pratense
ASRSIPPPPPAMAATIQSVKARQIFDSRGNPTVEVDVCCSDGTFARAAVPSGASTGVYEALELRDGGSDYLGKGVLKAVDNVNSIIGPALIGKDPTEQTELDNFMVHQLDGTKNEWGWCKQKLGANAILAVSLAVCKAGALVKKIPLYQHIANLAGNKQL

SEQ ID NO: 12 - protein, 336 aa, Phleum pratense
GNPTVEVDVCCSDGTFARAAVPSGASTGVYEALELRDGGSDYLGKGVLKAVDNVNSIIGPALIGKDPTEQTELDNFMVHQLDGTKNEWGWCKQKLGANAILAVSLAVCKAGALVKKIPLYQHIANLAGNKQLVLPVPAFNVINGGSHAGNKLAMQEFMILPTGASSFKEAMKMGVEVYHNLKSVIKKKYGQDATNVGDEGGFAPNIQENKEGLELLKTAIEKAGYTGKVVIGMDVAASEFYGEKDQTYDLNFKEENNDGSQKISGDSLKNVYKSFVSEYPIVSIEDPFDQDDWVHYAKMTEEIGEQVQIVGDDLLVTNPTRVAKAIAEKSCNALLL

SEQ ID NO: 13 - protein, 333 aa, Phleum pratense
TVEVDVCCSDGTFARAAVPSGASTGVYEALELRDGGSDYLGKGVLKAVDNVNSIIGPALIGKDPTEQTELDNFMVHQLDGTKNEWGWCKQKLGANAILAVSLAVCKAGALVKKIPLYQHIANLAGNKQLVLPVPAFNVINGGSHAGNKLAMQEFMILPTGASSFKEAMKMGVEVYHNLKSVIKKKYGQDATNVGDEGGFAPNIQENKEGLELLKTAIEKAGYTGKVVIGMDVAASEFYGEKDQTYDLNFKEENNDGSQKISGDSLKNVYKSFVSEYPIVSIEDPFDQDDWVHYAKMTEEIGEQVQIVGDDLLVTNPTRVAKAIAEKSCNALLL

SEQ ID NO: 14 - protein, 417 aa, Phleum pratense
TVEVDVCCSDGTFARAAVPSGASTGVYEALELRDGGSDYLGKGVLKAVDNVNSIIGPALIGKDPTEQTELDNFMVHQLDGTKNEWGWCKQKLGANAILAVSLAVCKAGALVKKIPLYQHIANLAGNKQLVLPVPAFNVINGGSHAGNKLAMQEFMILPTGASSFKEAMKMGVEVYHNLKSVIKKKYGQDATNVGDEGGFAPNIQENKEGLELLKTAIEKAGYTGKVVIGMDVAASEFYGEKDQTYDLNFKEENNDGSQKISGDSLKNVYKSFVSEYPIVSIEDPFDQDDWVHYAKMTEEIGEQVQIVGDDLLVTNPTRVAKAIAEKSCNALLLKVNQIGSVTESIEAVKMSKRAGWGVMTSHRSGETEDTFIADLAVGLSTGQIKTGAPCRSERLAKYNQLLRIEEELGAAAVYAGL

SEQ ID NO: 15 - protein, 110 aa, Phleum pratense
GNPTVEVDVCCSDGTFARAAVPSGASTGVYEALELRDGGSDYLGKGVLKAVDNVNSIIGPALIGKDPTEQTELDNFMVHQLDGTKNEWGWCKQKVFFNISADADAGAVAR

SEQ ID NO: 16 - protein, 322 aa, Phleum pratense
AILAVSLAVCKAGALVKKIPLYQHIANLAGNKQLVLPVPAFNVINGGSHAGNKLAMQEFMILPTGASSFKEAMKMGVEVYHNLKSVIKKKYGQDATNVGDEGGFAPNIQENKEGLELLKTAIEKAGYTGKVVIGMDVAASEFYGEKDQTYDLNFKEENNDGSQKISGDSLKNVYKSFVSEYPIVSIEDPFDQDDWVHYAKMTEEIGEQVQIVGDDLLVTNPTRVAKAIAEKSCNALLLKVNQIGSVTESIEAVKMSKRAGWGVMTSHRSGETEDTFIADLAVGLSTGQIKTGAPCRSERLAKYNQLLRIEEELGAAAVYAGL

SEQ ID NO: 17 - protein, 98 aa, Phleum pratense
GNPTVEVDVCCSDGTFARAAVPSGASTGVYEALELRDGGSDYLGKGVLKAVDNVNSIIGPALIGKDPTEQTELDNFMVHQLDGTKNEWGWCKQKLGAN

SEQ ID NO: 18 - protein, 67 aa, Phleum pratense
IDPSSSSSPAMAATIQSVKARQIFDSRGNPTVEVDVCCSDGTFARAAVPSGASTGVYEALELRDGGS

SEQ ID NO: 19 - protein, 223 aa, Phleum pratense
IDPSSSSSPAMAATIQSVKARQIFDSRGNPTVEVDVCCSDGTFARAAVPSGASTGVYEALELRDGGSDYLGKGVLKAVDNVNSIIGPALIGKDPTEQTELDNFMVHQLDGTKNEWGWCKQKLGANAILAVSLAVCKAGALVKKIPLYQHIANLAGNKQLVLPVPAFNVINGGSHAGNKLAMQEFMILPTGASSFKEAMKMGVEVYHNLKSVIKKKYGQDATNV

SEQ ID NO: 20 - protein, 274 aa, Phleum pratense
VSLAVCKAGALVKKIPLYQHIANLAGNKQLVLPVPAFNVINGGSHAGNKLAMQEFMILPTGASSFKEAMKMGVEVYHNLKSVIKKKYGQDATNVGDEGGFAPNIQENKEGLELLKTAIEKAGYTGKVVIGMDVAASEFYGEKDQTYDLNFKEENNDGSQKISGDSLKNVYKSFVSEYPIVSIEDPFDQDDWVHYAKMTEEIGEQVQIVGDDLLVTNPTRVAKAIAEKSCNALLLKVNQIGSVTESIEAVKMSKRAGWGVMTSHRSGETEDTFIA

SEQ ID NO: 21 - protein, 154 aa, Phleum pratense
ALRFPKASRSIPPPPAMAATIQSVKARQIFDSRGNPTVEVDVCCSDGTFARAAVPSGASTGVYEALELRDGGSDYLGKGVLKAVDNVNSIIGPALIGKDPTEQTELDNFMVHQLDGTKNEWGWCKQKLGANAILAVSLAICKAGASVKKIPLYQ

SEQ ID NO: 22 - protein, 322 aa, Phleum pratense
VSLAVCKAGALVKKIPLYQHIANLAGNKQLVLPVPAFNVINGGSHAGNKLAMQEFMILPTGASSFKEAMKMGVEVYHNLKSVIKKKYGQDATNVGDEGGFAPNIQENKEGLELLKTAIEKAGYTGKVVIGMDVAASEFYGEKDQTYDLNFKEENNDGSQKISGDSLKNVYKSFVSEYPIVSIEDPFDQDDWVHYAKMTEEIGEQVQIVGDDLLVTNPTRVAKAIAEKSCNALLLKVNQIGSVTESIEAVKMSKRAGWGVMTSHRSGETEDTFIADLAVGLSTGQIKTGAPCRSERLAKYNQLLRIEEELGAAAVYAGLKFRA

SEQ ID NO: 23 - protein, 78 aa, Phleum pratense
ALRFPKASRSIPPPPAMAATIQSVKARQIFDSRGNPTVEVDVCCSDGTFARAAVPSGASTGVYEALELRDGGSDYLGK

SEQ ID NO: 24 - protein, 278 aa, Phleum pratense
YGFPIVQRFLEGASSIDNHFRTASFEKNIPVLLGLLSVWNVSFLGYPARAILPYSQALEKLAPHIQQLSMESNGKGVSIDGVPLPYEAGEIDFGEPGTNGQHSFYQLIHQGRVIPCDFIGVIKSQQPVYLKGETVSNHDELMSNFFAQPDALAYGKNPEQLRSENVSENLIPHKTFKGNRPSLSFLLSSLSAYEIGQLLAIYEHRIAVQGFIWGINSFDQWGVELGKSLASQVRKQLHASRMEGKPVEGFNPSSASLLARYLAVEPSTPYDTTVLPKV

SEQ ID NO: 25 - protein, 202 aa, Phleum pratense
ENRSVLHVALRAPRDAVINSDGVNVVPEVWSVKDKIKQFSETFRSGSWVGATGKPLTNVVSVGIGGSFLGPLFVHTALQTDPEAAESAKGRQLRFLANVDPVDVARSIKDLDPETTLVVVVSKTFTTAETMLNARTIKEWIVSSLGPQAVSKHMIAVSTNLKLVKEFGIDPNNAFAFWDWVGGRYSVCSAVGVLPLSLQYGF

SEQ ID NO: 26 - protein, 172 aa, Phleum pratense
VKDKIKQFSETFRSGSWVGATGKPLTNVVSVGIGGSFLGPLFVHTALQTDPEAAESAKGRQLRFLANVDPVDVARSIKDLDPETTLVVVVSKTFTTAETMLNARTIKEWIVSSLGPQAVSKHMIAVSTNLKLVKEFGIDPNNAFAFWDWVGGRYSVCSAVGVLPLSLQYGFP

SEQ ID NO: 27 - protein, 346 aa, Phleum pratense
KLAEAAKLKEKIEKMFNGEKINSTENRSVLHVALRAPRDAVINSDGVNVVPEVWSVKDKIKQFSETFRSGSWVGATGKPLTNVVSVGIGGSFLGPLFVHTALQTDPEAAESAKGRQLRFLANVDPVDVARSIKDLDPETTLVVVVSKTFTTAETMLNARTIKEWIVSSLGPQAVSKHMIAVSTNLKLVKEFGIDPNNAFAFWDWVGGRYSVCSAVGVLPLSLQYGFPIVQRFLEGASSIDNHFRTASFEKNIPVLLGLLSVWNVSFLGYPARAILPYSQALEKLAPHIQQLSMESNGKGVSIDGVPLPYEAGEIDFGEPGTNGQHSFYQLIHQGRVIPCDFYDANK

SEQ ID NO: 28 - protein, 383 aa, Phleum pratense
KLAEAAKLKEKIEKMFNGEKINSTENRSVLHVALRAPRDAVINSDGVNVVPEVWSVKDKIKQFSETFRSGSWVGATGKPLTNVVSVGIGGSFLGPLFVHTALQTDPEAAESAKGRQLRFLANVDPVDVARSIKDLDPETTLVVVVSKTFTTAETMLNARTIKEWIVSSLGPQAVSKHMIAVSTNLKLVKEFGIDPNNAFAFWDWVGGRYSVCSAVGVLPLSLQYGFPIVQRFLEGASSIDNHFRTASFEKNIPVLLGLLSVWNVSFLGYPARAILPYSQALEKLAPHIQQLSMESNGKGVSIDGVPLPYEAGEIDFGEPGTNGQHSFYQLIHQGRVIPCDFIGVIKSQQPVYLKGETVSNHDELMSNFFAQPDALAYGKTPEQ

SEQ ID NO: 29 - protein, 165 aa, Phleum pratense
NGEKINSTENRSVLHVALRAPRDAVINSDGVNVVPEVWSVKDKIKQFSETFRSGSWVGATGKPLTNVVSVGIGGSFLGPLFVHTALQTDPEAAESAKGRQLRFLANVDPVDVARSIKDLDPETTLVVVVSKTFTTAETMLNARTIKEWIVSSLGPQAISKHMIAV

SEQ ID NO: 30 - protein, 167 aa, Phleum pratense
NGEKINSTENRSVLHVALRAPRDAVINSDGVNVVPEVWSVKDKIKQFSETFRSGSWVGATGKPLTNVVSVGIGGSFLGPLFVHTALQTDPEAAESAKGRQLRFLANVDPVDVARSIKDLDPETTLVVVVSKTFTTAETMLNARTIKEWIVSSLGPQAVSKHMIAVST

SEQ ID NO: 31 - protein, 146 aa, Phleum pratense
RDAVINSDGVNVVPEVWSVKDKIKQFSETFRSGSWVGATGKPLTNVVSVGIGGSFLGPLFVHTALQTDPEAAESAKGRQLRFLANVDPVDVARSIKDLDPETTLVVVVSKTFTTAETMLNARTIKEWIVSSLGPQAVSKHMIAVST

SEQ ID NO: 32 - protein, 442 aa, Phleum pratense
IKQFSETFRSGSWVGATGKPLTNVVSVGIGGSFLGPLFVHTALQTDPEAAESAKGRQLRFLANVDPVDVARSIKDLDPETTLVVVVSKTFTTAETMLNARTIKEWIVSSLGPQAVSKHMIAVSTNLKLVKEFGIDPNNAFAFWDWVGGRYSVCSAVGVLPLSLQYGFPIVQRFLEGASSIDNHFRTASFEKNIPVLLGLLSVWNVSFLGYPARAILPYSQALEKLAPHIQQLSMESNGKGVSIDGVPLPYEAGEIDFGEPGTNGQHSFYQLIHQGRVIPCDFIGVIKSQQPVYLKGETVSNHDELMSNFFAQPDALASRKTPAPLRSENVSENLIPHKTFKGNRPSLSFLLSSLSAYEIGQLLAIYEHRIAVQGFIWGINSFDQWGVELGKSLASQVRKQLHASRMEGKPVEGFNPSSASLLARYLAVEPSTPYDTTVLPKV

SEQ ID NO: 33 - protein, 326 aa, Phleum pratense
IKQFSETFRSGSWVGATGKPLTNVVSVGIGGSFLGPLFVHTALQTDPEAAESAKGRQLRFLANVDPVDVARSIKDLDPETTLVVVVSKTFTTAETMLNARTIKEWIVSSLGPQAVSKHMIAVSTNLKLVKEFGIDPNNAFAFWDWVGGRYSVCSAVGVLPLSLQYGFPIVQRFLEGASSIDNHFRTASFEKNIPVLLGLLSVWNVSFLGYPARAILPYSQALEKLAPHIQQLSMESNGKGVSIDGVPLPYEAGEIDFGEPGTNGQHSFYQLIHQGRVIPCDFIGVIKSQQPVYLKGETVSNHDELMSNFFAQPDALAYGKTPEHSR

SEQ ID NO: 34 - protein, 285 aa, Phleum pratense
AEFEGVFLDFARQQATTETVDKLFKLAEAAKLKEKIEKMFNGEKINSTENRSVLHVALRAPRDAVINSDGVNVVPEVWSVKDKIKQFSETFRSGSWVGATGKPLTNVVSVGIGGSFLGPLFVHTALQTDPEAAESAKGRQLRFLANVDPVDVARSIKDLDPETTLVVVVSKTFTTAETMLNARTIKEWIVSSLGPQAVSKHMIAVSTNLKLVKEFGIDPNNAFAFWDWVGGRYSVCSAVGVLPLSLQYGFPIVQRFLEGASSIDNHFRTASFEKNIPVLLGLLSV

SEQ ID NO: 35 - protein, 248 aa, Phleum pratense
EAAESAKGRQLRFLANVDPVDVARSIKDLDPETTLVVVVSKTFTTAETMLNARTIKEWIVSSLGPQAVSKHMIAVSTNLKLVKEFGIDPNNAFAFWDWVGGRYSVCSAVGVLPLSLQYGFPIVQRFLEGASSIDNHFRTASFEKNIPVLLGLLSVWNVSFLGYPARAILPYSQALEKLAPHIQQLSMESNGKGVSIDGVPLPYEAGEIDFGEPGTNGQHSFYQLIHQGRVIPCDFIGVIKSQQPVYLK

SEQ ID NO: 36 - protein, 88 aa, Phleum pratense
ILLVFAETAEPEVKVVDLTILSPDRPDLVLPIPFVADEKGYAFALKDGSTYSFRFSFIVSNNIVSGLKYTNTVWKTGVRVENQKMMLG

SEQ ID NO: 37 - protein, 93 aa, Phleum pratense
LLGQVDTEQLGETAEPEVKVVDLTILSPDRPDLVLPIPFVADEKGYAFALKDGSTYSFRFSFIVSNNIVSGLKYTNTVWKTGVRVENQKMMLG

SEQ ID NO: 38 - protein, 90 aa, Phleum pratense
ETAEPEVKVVDLTILSPDRPDLVLPIPFVADEKGYAFALKDGSTYSFRFSFIVSNNIVSGLKYTNTVWKTGVRVENQKMMLGTFSPQPEP

SEQ ID NO: 39 - protein, 68 aa, Phleum pratense
VENQKMMLGTFSPQPEPYIYVGEEETTPAGIFARGSYSAKLKFVDDDGKVYLEMSYYFEIRKDWPTGQ

SEQ ID NO: 40 - protein, 50 aa, Phleum pratense
IYVGEEETTPAGIFARGSYSAKLKFVDDDGKVYLEMSYYFEIRKDWPTGQ

SEQ ID NO: 41 - protein, 97 aa, Phleum pratense
YSFRFSFIVSNNIVSGLKYTNTVWKTGVRVENQKMMLGTFSPQPEPYIYVGEEETTPAGIFARGSYSAKLKFVDDDGKVYLEMSYYFEIRKDWPTGQ

SEQ ID NO: 42 - protein, 94 aa, Phleum pratense
YSFRFSFIVSNNIVSGLKYTNTVWKTGVRVENQKMMLGTFSPQPEPYIYVGEEETTPAGIFARGSYSAKLKFVDDDGKVYLEMSYYFEIRKDWP

SEQ ID NO: 43 - protein, 97 aa, Phleum pratense
ETAEPEVKVVDLTILSPDRPDLVLPIPFVADEKGYAFALKDGSTYSFRFSFIVSNNIVSGLKYTNTVWKTGVRVENQKMMLGTFSPQPEPYIYVGEE

SEQ ID NO: 44 - protein, 74 aa, Phleum pratense
WKTGVRVENQKMMLGTFSPQPEPYIYVGEEETTPAGIFARGSYSAKLKFVDDDGKVYLEMSYYFEIRKDWPTGQ

SEQ ID NO: 45 - protein, 77 aa, Phleum pratense
EQLGETAEPEVKVVDLTILSPDRPDLVLPIPFVADEKGYAFALKDGSTYSFRFSFIVSNNIVSGLKYTNTVWKTGVR

SEQ ID NO: 46 - protein, 379 aa, Phleum pratense
MKTIFDFESIKKLLASPKFSFCFDGLHGVAGAYAKRMFVDELGASESSLLNCVPKEDFGGGHPDPNLTYAKELVERMGLGKSSSNVEPPEFGAAADGDADRNMVLGKRFFVTPSDSVAIIAANAVQSIPYFASGLKGVARSMPTSAALDVVAKNLNLKFFEVPTGWKFFGNLMDAGMCSVCGEESFGTGSDHIREKDGIWAVLAWLSIIAYKNKDNLGGDKLVSVEDIVLQHWATYGRHYYTRYDYENVDAEAAKELMANLVKMQSALSDVNKLIKEIQPDVAEVVSADEFEYKDPVDGSVSKHQGIRYLFGDGSRLVFRLSGTGSVGATIRIYIEQYEKDSSKTGRESSDALSPLVDVALKLSKIKEYTGRSAPTVIT

SEQ ID NO: 47 - protein, 379 aa, Phleum pratense; identical to SEQ ID NO: 46

SEQ ID NO: 48 - protein, 384 aa, Phleum pratense
PSPFNSRTIFDFESIKKLLASPKFSFCFDGLHGVAGAYAKRMFVDELGASESSLLNCVPKEDFGGGHPDPNLTYAKELVERMGLGKSSSNVEPPEFGAAADGDADRNMVLGKRFFVTPSDSVAIIAANAVQSIPYFASGLKGVARSMPTSAALDVVAKNLNLKFFEVPTGWKFFGNLMDAGMCSVCGEESFGTGSDHIREKDGIWAVLAWLSIIAYKNKDNLGGDKLVSVEDIVLQHWATYGRHYYTRYDYENVDAEAAKELMANLVKMQSALSDVNKLIKEIQPDVAEVVSADEFEYKDPVDGSVSKHQGIRYLFGDGSRLVFRLSGTGSVGATIRIYIEQYEKDSSKTGRESSDALSPLVDVALKLSKIKEYTGRSAPTVIT

SEQ ID NO: 49 - protein, 384 aa, Phleum pratense; identical to SEQ ID NO: 48

SEQ ID NO: 50 - protein, 304 aa, Phleum pratense
KLMKTIFDFESIKKLLASPKFSFCFDGLHGVAGAYAKRMFVDELGASESSLLNCVPKEDFGGGHPDPNLTYAKELVERMGLGKSSSNVEPPEFGAAADGDADRNMVLGKRFFVTPSDSVAIIAANAVQSIPYFASGLKGVARSMPTSAALDVVAKNLNLKFFEVPTGWKFFGNLMDAGMCSVCGEESFGTGSDHIREKDGIWAVLAWLSIIAYKNKDNLGGDKLVSVEDIVLQHWATYGRHYYTRYDYENVDAEAAKELMANLVKMQSALSDVNKLIKEIQPDVAEVVSADEFEYKDPVDGSVS

SEQ ID NO: 51 - protein, 381 aa, Phleum pratense
KLMKTIFDFESIKKLLASPKFSFCFDGLHGVAGAYAKRMFVDELGASESSLLNCVPKEDFGGGHPDPNLTYAKELVERMGLGKSSSNVEPPEFGAAADGDADRNMVLGKRFFVTPSDSVAIIAANAVQSIPYFASGLKGVARSMPTSAALDVVAKNLNLKFFEVPTGWKFFGNLMDAGMCSVCGEESFGTGSDHIREKDGIWAVLAWLSIIAYKNKDNLGGDKLVSVEDIVLQHWATYGRHYYTRYDYENVDAEAAKELMANLVKMQSALSDVNKLIKEIQPDVAEVVSADEFEYKDPVDGSVSKHQGIRYLFGDGSRLVFRLSGTGSVGATIRIYIEQYEKDSSKTGRESSDALSPLVDVALKLSKIKEYTGRSAPTVIT

SEQ ID NO: 52 - protein, 381 aa, Phleum pratense; identical to SEQ ID NO: 51

SEQ ID NO: 53 - protein, 378 aa, Phleum pratense
KTIFDFESIKKLLASPKFSFCFDGLHGVAGAYAKRMFVDELGASESSLLNCVPKEDFGGGHPDPNLTYAKELVERMGLGKSSSNVEPPEFGAAADGDADRNMVLGKRFFVTPSDSVAIIAANAVQSIPYFASGLKGVARSMPTSAALDVVAKNLNLKFFEVPTGWKFFGNLMDAGMCSVCGEESFGTGSDHIREKDGIWAVLAWLSIIAYKNKDNLGGDKLVSVEDIVLQHWATYGRHYYTRYDYENVDAEAAKELMANLVKMQSALSDVNKLIKEIQPDVAEVVSADEFEYKDPVDGSVSKHQGIRYLFGDGSRLVFRLSGTGSVGATIRIYIEQYEKDSSKTGRESSDALSPLVDVALKLSKIKEYTGRSAPTVIT

SEQ ID NO: 54 - protein, 358 aa, Phleum pratense
KLMKTIFDFESIKKLLASPKFSFCFDGLHGVAGAYAKRMFVDELGASESSLLNCVPKEDFGGGHPDPNLTYAKELVERMGLGKSSSNVEPPEFGAAADGDADRNMVLGKRFFVTPSDSVAIIAANAVQSIPYFASGLKGVARSMPTSAALDVVAKNLNLKFFEVPTGWKFFGNLMDAGMCSVCGEESFGTGSDHIREKDGIWAVLAWLSIIAYKNKDNLGGDKLVSVEDIVLQHWATYGRHYYTRYDYENVDAEAAKELMANLVKMQSALSDVNKLIKEIQPDVAEVVSADEFEYKDPVDGSVSKHQGIRYLFGDGSRLVFRLSGTGSVGATIRIYIEQYEKDSSKTGRESSDALSPL

SEQ ID NO: 55 - protein, 372 aa, Phleum pratense
NSRTIFDFESIKKLLASPKFSFCFDGLHGVAGAYAKRMFVDELGASESSLLNCVPKEDFGGGHPDPNLTYAKELVERMGLGKSSSNVEPPEFGAAADGDADRNMVLGKRFFVTPSDSVAIIAANAVQSIPYFASGLKGVARSMPTSAALDVVAKNLNLKFFEVPTGWKFFGNLMDAGMCSVCGEESFGTGSDHIREKDGIWAVLAWLSIIAYKNKDNLGGDKLVSVEDIVLQHWATYGRHYYTRYDYENVDAEAAKELMANLVKMQSALSDVNKLIKEIQPDVAEVVSADEFEYKDPVDGSVSKHQGIRYLFGDGSRLVFRLSGTGSVGATIRIYIEQYEKDSSKTGRESSDALSPLVDVALKLSKIKEYTG

SEQ ID NO: 56 - protein, 215 aa, Phleum pratense
GWKFFGNLMDAGMCSVCGEESFGTGSDHIREKDGIWAVLAWLSIIAYKNKDNLGGDKLVSVEDIVLQHWATYGRHYYTRYDYENVDAEAAKELMANLVKMQSALSDVNKLIKEIQPDVAEVVSADEFEYKDPVDGSVSKHQGIRYLFGDGSRLVFRLSGTGSVGATIRIYIEQYEKDSSKTGRESSDALSPLVDVALKLSKIKEYTGRSAPTVIT

SEQ ID NO: 57 - protein, 246 aa, Phleum pratense
DEYLAAVAKARRKLRGLIAEKNCAPLMLRIAWHSAGTFDVATKTGGPFGTMRCPAELAHGANAGLDIAVRLLEPIKEQVPILSYADFYQLAGVVAVEITGGPEVPFHPGRQDKTEPPPEGRLPDATLGSDHLRQVFTAQMGLSDQDIVALSGGHTLGRCHKERSGFEGAWTANPLIFDNSYFTELLTGEKEGLLQLPTDKTLLTDPAFRPLVDKYAADEDAFFADYAEAHLKLSELGFGEATEGCC

SEQ ID NO: 58 - protein, 258 aa, Phleum pratense
GAMAAKCYPTVSDEYLAAVAKARRKLRGLIAEKNCAPLMLRIAWHSAGTFDVATKTGGPFGTMRCPAELAHGANAGLDIAVRLLEPIKEQVPILSYADFYQLAGVVAVEITGGPEVPFHPGRQDKTEPPPEGRLPDATLGSDHLRQVFTAQMGLSDQDIVALSGGHTLGRCHKERSGFEGAWTANPLIFDNSYFTELLTGEKEGLLQLPTDKTLLTDPAFRPLVDKYAADEDAFFADYAEAHLKLSELGFGEATEGCC

SEQ ID NO: 59 - protein, 253 aa, Phleum pratense
KCYPTVSDEYLAAVAKARRKLRGLIAEKNCAPLMLRIAWHSAGTFDVATKTGGPFGTMRCPAELAHGANAGLDIAVRLLEPIKEQVPILSYADFYQLAGVVAVEITGGPEVPFHPGRQDKTEPPPEGRLPDATLGSDHLRQVFTAQMGLSDQDIVALSGGHTLGRCHKERSGFEGAWTANPLIFDNSYFTELLTGEKEGLLQLPTDKTLLTDPAFRPLVDKYAADEDAFFADYAEAHLKLSELGFGEATEGCC

SEQ ID NO: 60 - protein, 164 aa, Phleum pratense
KCYPTVSDEYLAAVAKARRKLRGLIAEKNCAPLMLRIAWHSAGTFDVATKTGGPFGTMRCPAELAHGANAGLDIAVRLLEPIKEQVPILSYADFYQLAGVVAVEITGGPEVPFHPGRQDKTEPPPEGRLPDATLGSDHLRQVFTAQMGLSDQDIVALSGGHTLG

SEQ ID NO: 61 - protein, 254 aa, Phleum pratense
AKCYPTVSDEYLAAVAKARRKLRGLIAEKNCAPLMLRIAWHSAGTFDVATKTGGPFGTMRCPAELAHGANAGLDIAVRLLEPIKEQVPILSYADFYQLAGVVAVEITGGPEGPFHPGRQDKTEPPPEGRLPDATLGSDHLRQVFTAQMGLSDQDIVALSGGHTLGRCHKERSGFEGAWTANPLIFDNSYFTELLTGEKEGLLQLPTDKTLLTDPAFRPLVDKYAADEDAFFADYAEAHLKLSELGFGEATEGCC

SEQ ID NO: 62 - protein, 144 aa, Phleum pratense
VAKARRKLRGLIAEKNCAPLMLRIAWHSAGTFDVATKTGGPFGTMRCPAELAHGANAGLDIAVRLLEPIKEQVPILSYADFYQLAGVVAVEITGGPEVPFHPGRQDKTEPPPEGRLPDATLGSDHLRQVFTAQMGLSDQDIVAL

SEQ ID NO: 63 - protein, 240 aa, Phleum pratense
VAKARRKLRGLIAEKNCAPLMLRIAWHSAGTFDVATKTGGPFGTMRCPAELAHGANAGLDIAVRLLEPIKEQVPILSYADFYQLAGVVAVEITGGPEVPFHPGRQDKTEPPPEGRLPDATLGSDHLRQVFTAQMGLSDQDIVALSGGHTLGRCHKERSGFEGAWTANPLIFDNSYFTELLTGEKEGLLQLPTDKTLLTDPAFRPLVDKYAADEDAFFADYAEAHLKLSELGFGEATEGCC

SEQ ID NO: 64 - protein, 264 aa, Phleum pratense
AFPHPIGAMAAKCYPTVSDEYLAAVAKARRKLRGLIAEKNCAPLMLRIAWHSAGTFDVATKTGGPFGTMRCPAELAHGANAGLDIAVRLLEPIKEQVPILSYADFYQLAGVVAVEITGGPEGPFHPGRQDKTEPPPEGRLPDATLGSDHLRQVFTAQMGLSDQDIVALSGGHTLGRCHKERSGFEGAWTANPLIFDNSYFTELLTGEKEGLLQLPTDKTLLTDPAFRPLVDKYAADEDAFFADYAEAHLKLSELGFGEATEGCC

SEQ ID NO: 65 - protein, 275 aa, Phleum pratense
HPDPQPHSSPTPRAFPIGAMAAKCYPTVSDEYLAAVAKARRKLRGLIAEKNCAPLMLRIAWHSAGTFDVATKTGGPFGTMRCPAELAHGANAGLDIAVRLLEPIKEQVPILSYADFYQLAGVVAVEITGGPEVPFHPGRQDKTEPPPEGRLPDATLGSDHLRQVFTAQMGLSDQDIVALSGGHTLGRCHKERSGFEGAWTANPLIFDNSYFTELLTGEKEGLLQLPTDKTLLTDPAFRPLVDKYAADEDAFFADYAEAHLKLSELGFGEATEGCC

SEQ ID NO: 66 - protein, 147 aa, Phleum pratense
GGPEVPFHPGRQDKTEPPPEGRLPDATLGSDHLRQVFTAQMGLSDQDIVALSGGHTLGRCHKERSGFEGAWTANPLIFDNSYFTELLTGEKEGLLQLPTDKTLLTDPAFRPLVDKYAADEDAFFADYAEAHLKLSELGFGEATEGCC

SEQ ID NO: 67 - protein, 281 aa, Phleum pratense
AGLPQISDNEKSGFISLVSRYLSGEEEHIEWPKIHTPTDEVVVPYDTIDAPPEDLEATKALLDKLAVLKLNGGLGTTMGCTGPKSVIEVRNGFTFLDLIVLQIESLNKKYGSNVPLLLMNSFNTHEDTLKIVEKYANSSIDIHTFNQSQYPRVVADEFLPWPSKGKTDKDGWYPPGHGDIFPSLMNSGKLDLLLSQGKEYVFIANSDNLGAIVDMKILNHLIHKQNEYCMEVTPKTLADVKGGTLISYEGRVQLLEIAQVPDAHVDEFKSIEKFKIFNTNN

SEQ ID NO: 68 - protein, 115 aa, Phleum pratense
EVDGVKVLQLETAAGAAIRFFDHAIGINVPRSRFLPVKATSDLQLVQSDLYTLVDGFVTRNSARTDPSNPSIELGPEFKKVGCFLGRFKSIPSIVELDSLKVSGDVWFGSGIVLK

SEQ ID NO: 69 - protein, 115 aa, Phleum pratense
EVDGVKVLQLETAAGAAIRFFDHAIGINVPRSRFLPVKATSDLQLVQSDLYTLVDGFVTRNSARTDPSNPSIELGPEFKKVGSFLGRFKSIPSIVELDSLKVSGDVWFGSGIVLK

SEQ ID NO: 70 - protein, 186 aa, Phleum pratense
FIANSDNLGAIVDMKILNHLIHKQNEYCMEVTPKTLADVKGGTLISYEGRVQLLEIAQVPDAHVDEFKSIEKFKIFNTNNLWVNLKAIKRLVEADALKMEIIPNPKEVDGVKVLQLETAAGAAIRFFDHAIGINVPRSRFLPVKATSDLQLVQSDLYTLVDGFVTRNSARTDPSNPSIELGPEFKK

SEQ ID NO: 71 - protein, 115 aa, Phleum pratense; identical to SEQ ID NO: 69

SEQ ID NO: 72 - protein, 351 aa, Phleum pratense
TLLFPHTQISLPSVRTRKHLAATMADEKLAKLREAVAGLPQISDNEKSGFISLVSRYLSGDEEHIEWPKIHTPTDEVVVPYDTIDAPPEDLEATKALLNKLAVLKLNGGLGTTMGCTGPKSVIEVRNGFTFLDLIVLQIESLNKKYGSNVPLLLMNSFNTHEDTLKIVEKYANSSIDIHTFNQSQYPRVVADEFLPWPSKGKTDKDGWYPPGHGDIFPSLMNSGKLDLLLSQGKEYVFIANSDNLGAIVDMKILNHLIHKQNEYCMEVTPKTLADVKGGTLISYEGRVQLLEIAQVPDAHVDEFKSIEKFKIFNTNNLWVNLKAIKRLVEADALKMEIIPNPKEVDTVNFF

SEQ ID NO: 73 - protein, 271 aa, Phleum pratense
YDTVDAPPEDLEATKALLNKLAVLKLNGGLGTTMGCTGPKSVIEVRNGFTFLDLIVLQIESLNKKYGSNVPLLLMNSFNTHEDTLKIVEKYANSSIDIHTFNQSQYPRVVADEFLPWPSKGKTDKDGWYPPGHGDIFPSLMNSGKLDLLLSQGKEYVFIANSDNLGAIVDMKILNHLIHKQNEYCMEVTPKTLADVKGGTLISYEGRVQLLEIAQVPDAHVDEFKSIEKFKIFNTNNLWVNLKAIKRLVEADALKMEIIPNPKEVDTVNFF

SEQ ID NO: 74 - protein, 265 aa, Phleum pratense
EDLEATKALLDKLAVLKLNGGLGTTMGCTGPKSVIEVRNGFTFLDLIVLQIESLNKKYGSNVPLLLMNSFNTHEDTLKIVEKYANSSIDIHTFNQSQYPRVVADEFLPWPSKGKTDKDGWYPPGHGDIFPSLMNSGKLDLLLSQGKEYVFIANSDNLGAIVDMKILNHLIHKQNEYCMEVTPKTLADVKGGTLISYEGRVQLLEIAQVPDAHVDEFKSIEKFKIFNTNNLWVNLKAIKRLVEADALKMEIIPNPKEVDTVNFFRV

SEQ ID NO: 75 - protein, 261 aa, Phleum pratense
GKLRLVFEGKDETVDLEVFNFTGAGGVALAMYNTDESIQGFAEASMAIAYEKKWPLYLSTKNTILKKYDGRFKDIFQAVYEADWKSKYEAAGIWYEHRLIDDMVAYALKSEGGYVWACKNYDGDVQSDFLAQGFGSLGLMTSVLMCPDGKNIEAEAAHGTVTRHFRVHQKGGETSTNSIASIFAWTRGLAHRAKLDDNARLLDFTQKLEDACVGTVESGKMTKDLALLVHGSSKVTRGDYLNTEEFIDAVAAELQSRLAAN

SEQ ID NO: 76 - protein, 270 aa, Phleum pratense
ATDAVLKGPGKLRLVFEGKDETVDLEVFNFTGAGGVALAMYNTDESIQGFAEASMAIAYEKKWPLYLSTKNTILKKYDGRFKDIFQAVYEADWKSKYEAAGIWYEHRLIDDMVAYALKSEGGYVWACKNYDGDVQSDFLAQGFGSLGLMTSVLMCPDGKNIEAEAAHGTVTRHFRVHQKGGETSTNSIASIFAWTRGLAHRAKLDDNARLLDFTQKLEDACVGTVESGKMTKDLALLVHGSSKVTRGDYLNTEEFIDAVAAELQSRLAAN

SEQ ID NO: 77 - protein, 83 aa, Phleum pratense
YPLFCRFKDIFQAVYEADWKSKYEAAGIWYEHRLIDDMVAYALKSEGGYVWACKNYDGDVQSDFLAQGFGSLGLMTSVLMCPD

SEQ ID NO: 78 - protein, 110 aa, Phleum pratense
IEAEAAHGTVTRHFRVHQKGGETSTNSIASIFAWTRGLAHRAKLDDNARLLDFTQKLEDACVGTVESGKMTKDLALLVHGSSKVTRGDYLNTEEFIDAVAAELQSRLAAN

SEQ ID NO: 79 - protein, 87 aa, Phleum pratense
STNSIASIFAWTRGLAHRAKLDDNARLLDFTQKLEDACVGTVESGKMTKDLALLVHGSSKVTRGDYLNTEEFIDAVAAELQSRLAAN

SEQ ID NO: 80 - protein, 315 aa, Phleum pratense
PFSLCLLPSGTVFREPIICKNVPKLVPGWTKPICIGRHAFGDQYRATDAVLKGPGKLRLVFEGKDETVDLEVFNFTGAGGVALAMYNTDESIQGFAEASMAIAYEKKWPLYLSTKNTILKKYDGRFKDIFQAVYEADWKSKYEAAGIWYEHRLIDDMVAYALKSEGGYVWACKNYDGDVQSDFLAQGFGSLGLMTSVLMCPDGKTIEAEAAHGTVTRHFRVHQKGGETSTNSIASIFAWTRGLAHRAKLDDNARLLDFTQKLEDACVGTVESGKMTKDLALLVHGSSKVTRGDYLNTEEFIDAVAAELQSRLAAN

SEQ ID NO: 81 - protein, 344 aa, Phleum pratense
YNVAIKCATITPDEDRVKEFNLKQMWRSPNGTIRNIINGTVFREPIICKNVPKLVPGWTKPICIGRHAFGDQYRATDAVLKGPGKLRLVFEGKDETVDLEVFNFTGAGGVALAMYNTDESIQGFAEASMAIAYEKKWPLYLSTKNTILKKYDGRFKDIFQAVYEADWKSKYEAAGIWYEHRLIDDMVAYALKSEGGYVWACKNYDGDVQSDFLAQGFGSLGLMTSVLMCPDGKTIEAEAAHGTVTRHFRVHQKGGETSTNSIASIFAWTRGLAHRAKLDDNARLLDFTQKLEDACVGTVESGKMTKDLALLVHGSSKVTRGDYLNTEEFIDAVAAELQSRLAAN

SEQ ID NO: 82 - protein, 251 aa, Phleum pratense
DETVDLEVFNFTGAGGVALAMYNTDESIQGFAEASMAIAYEKKWPLYLSTKNTILKKYDGRFKDIFQAVYEADWKSKYEAAGIWYEHRLIDDMVAYALKSEGGYVWACKNYDGDVQSDFLAQGFGSLGLMTSVLMCPDGKTIEAEAAHGTVTRHFRVHQKGGETSTNSIASIFAWTRGLAHRAKLDDNARLLDFTQKLEDACVGTVESGKMTKDLALLVHGSSKVTRGDYLNTEEFIDAVAAELQSRLAAN

SEQ ID NO: 83 - protein, 251 aa, Phleum pratense
DETVDLEVFNFTGAGGVALAMYNTDESIQGFAEASMAIAYEKKWPLYLSTKNTILKKYDGRFKDIFQAVYEADWKSKYEAAGIWYEHRLIDDMVAYALKSEGGYVWACKNYDGDVQSDFLAQGFGSLGLMTSVLMCPDGKPIEAEAAHGTVTRHFRVHQKGGETSTNSIASIFAWTRGLAHRAKLDDNARLLDFTQKLEDACVGTVESGKMTKDLALLVHGSSKVTRGDYLNTEEFIDAVAAELQSRLAAN

SEQ ID NO: 84 - protein, 89 aa, Phleum pratense
STNSIASIFAWTRGLAHRAKLDDNARLLDFTQKLEDACVGTVESGKMTKDLALLVHGSSKVTRGDYLNTEEFIDAVAAELQSRLAANCV

SEQ ID NO: 85 - protein, 448 aa, Phleum pratense
ILVTPDGNFNTAGMLVVQSGCWTMLKGGATSFAAGKGELFFETNVTAELMVDSMSLQPFSFEEWKSHRHESIAKERKKKVKITVHGSDGKVLPDAELSLERVAKGFPLGNAMTKEILDIPEYEKWFTSRFTVATMENEMKWYSTEYDQNQELYEIPDKMLALAEKYNISVRGHNVFWDDQSKQMDWVSKLSAPQLKKAMEKRMKNVVSRYAGKLIHWDVLNENLHYSFFEDKLGKDASAEVFKEVAKLDDKPILFMNEYNTIEEPNDAAPLPTKYLAKLKQIQSYPGNSKLKYGIGLESHFDTPNIPYVRGSLDTLAQAKVPIWLTEIDVKKGPKQVEYLEEVMREGFAHPGVKGIVLWGAWHAKECYVMCLTDKNFKNLPVGDVVDKLITEWKAVPEDAKTDDKGVFEAELFHGEYNVTVKHKSLKEPLMHTVDLDSKSEATIRAKK

SEQ ID NO: 86 - protein, 364 aa, Phleum pratense
GNFNTAGMLVVQSGCWTMLKGGATSFAAGKGELFFETNVTAELMVDSMSLQPFSFEEWKSHRHESIAKERKKKVKITVHGSDGKVLPDAELSLERVAKGFPLGNAMTKEILDIPEYEKWFTSRFTVATMENEMKWYSTEYDQNQELYEIPDKMLALAEKYNISVRGHNVFWDDQSKQMDWVSKLSAPQLKKAMEKRMKNVVSRYAGKLIHWDVLNENLHYSFFEDKLGKDASAEVFKEVAKLDDKPILFMNEYNTIEEPNDAAPLPTKYLAKLKQIQSYPGNSKLKYGIGLESHFDTPNIPYVRGSLDTLAQAKVPIWLTEIDVKKGPKQVEYLEEVMREGFAHPGVKGIVLWGAWHAKECYVM

SEQ ID NO: 87 - protein, 526 aa, Phleum pratense
YSANIECEKEPPKPLYGGGILTGAEAPAPVSAGGKKLLMAKSKSAPAKGSTLKVELEKDTHYTLSAWLQLSKSTGDVKAILVTPDGNFNTAGMLVVQSGCWTMLKGGATSFAAGKGELFFETNVTAELVDSMSLQPFSFEEWKSHRHESIAKERKKKVKITVHGSDGKVLPDAELSLERVAKGFPLGNAMTKEILDIPEYEKWFTSRFTVATMENEMKWYSTEYDQNQELYEIPDKMLALAEKYNISVRGHNVFWDDQSKQMDWVSKLSAPQLKKAMEKRMKNVVSRYAGKLIHWDVLNENLHYSFFEDKLGKDASAEVFKEVAKLDDKPILFMNEYNTIEEPNDAAPLPTKYLAKLKQIQSYPGNSKLKYGIGLESHFDTPNIPYVRGSLDTLAQAKVPIWLTEIDVKKGPKQVEYLEEVMREGFAHPGVKGIVLWGAWHAKECYVMCLTDKNFKNLPVGDVVDKLITEWKAVPEDAKTDDKGVFEAELFHGEYNVTVKHKSLKEPLMHTVDLDSKSEATIRAKK

SEQ ID NO: 88 - protein, 575 aa, Phleum pratense
HTTIVASGIENMKIFTRTWVLLLLVVLLFEGCLAKSYKSEKSDKSATYDYSANIECEKEPPKPLYGGGILTGAEAPAPVSAGGKKLLMAKSKSAPAKGSTLKVELEKDTHYTLSAWLQLSKSTGDVKAILVTPDGNFNTAGMLVVQSGCWTMLKGGATSFAAGKGELFFETNVTAELVDSMSLQPFSFEEWKSHRHESIAKERKKKVKITVHGSDGKVLPDAELSLERVAKGFPLGNAMTKEILDIPEYEKWFTSRFTVATMENEMKWYSTEYDQNQELYEIPDKMLALAEKYNISVRGHNVFWDDQSKQMDWVSKLSAPQLKKAMEKRMKNVVSRYAGKLIHWDVLNENLHYSFFEDKLGKDASAEVFKEVAKLDDKPILFMNEYNTIEEPNDAAPLPTKYLAKLKQIQSYPGNSKLKYGIGLESHFDTPNIPYVRGSLDTLAQAKVPIWLTEIDVKKGPKQVEYLEEVMREGFAHPGVKGIVLWGAWHAKECYVMCLTDKNFKNLPVGDVVDKLITEWKAVPEDAKTDDKGVFEAELFHGEYNVTVKHKSLKEPLMHTVDLDSKSEATIRAKK

SEQ ID NO: 89 - protein, 400 aa, Phleum pratense
LMVDSMSLQPFSFEEWKSHRHESIAKERKKKVKITVHGSDGKVLPDAELSLERVAKGFPLGNAMTKEILDIPEYEKWFTSRFTVATMENEMKWYSTEYDQNQELYEIPDKMLALAEKYNISVRGHNVFWDDQSKQMDWVSKLSAPQLKKAMEKRMKNVVSRYAGKLIHWDVLNENLHYSFFEDKLGKDASAEVFKEVAKLDDKPILFMNEYNTIEEPNDAAPLPTKYLAKLKQIQSYPGNSKLKYGIGLESHFDTPNIPYVRGSLDTLAQAKVPIWLTEIDVKKGPKQVEYLEEVMREGFAHPGVKGIVLWGAWHAKECYVMCLTDKNFKNLPVGDVVDKLITEWKAVPEDAKTDDKGVFEAELFHGEYNVTVKHKSLKEPLMHTVDLDSKSEATIRAKK

SEQ ID NO: 90 - protein, 579 aa, Phleum pratense
ALTHTTIVASGIENMKIFTRTWVLLLLVVLLFEGCLAKSYKSEKSDKSATYDYSANIECEKEPPKPLYGGGILTGAEAPAPVSAGGKKLLMAKSKSAPAKGSTLKVELEKDTHYTLSAWLQLSKSTGDVKAILVTPDGNFNTAGMLVVQSGCWTMLKGGATSFAAGKGELFFETNVTAELMVDSMSLQPFSFEEWKSHRHESIAKERKKKVKITVHGSDGKVLPDAELSLERVAKGFPLGNAMTKEILDIPEYEKWFTSRFTVATMENEMKWYSTEYDQNQELYEIPDKMLALAEKYNISVRGHNVFWDDQSKQMDWVSKLSAPQLKKAMEKRMKNVVSRYAGKLIHWDVLNENLHYSFFEDKLGKDASAEVFKEVAKLDDKPILFMNEYNTIEEPNDAAPLPTKYLAKLKQIQSYPGNSKLKYGIGLESHFDTPNIPYVRGSLDTLAQAKVPIWLTEIDVKKGPKQVEYLEEVMREGFAHPGVKGIVLWGAWHAKECYVMCLTDKNFKNLPVGDVVDKLITEWKAVPEDAKTDDKGVFEAELFHGEYNVTVKHKSLKEPLMHTVDLDSKSEATIRAKK

SEQ ID NO: 91 - protein, 486 aa, Phleum pratense
SKSAPAKGSTLKVELEKDTHYTLSAWLQLSKSTGDVKAILVTPDGNFNTAGMLVVQSGCWTMLKGGATSFAAGKGELFFETNVTAELMVDSMSLQPFSFEEWKSHRHESIAKERKKKVKITVHGSDGKVLPDAELSLERVAKGFPLGNAMTKEILDIPEYEKWFTSRFTVATMENEMKWYSTEYDQNQELYEIPDKMLALAEKYNISVRGHNVFWDDQSKQMDWVSKLSAPQLKKAMEKRMKNVVSRYAGKLIHWDVLNENLHYSFFEDKLGKDASAEVFKEVAKLDDKPILFMNEYNTIEEPNDAAPLPTKYLAKLKQIQSYPGNSKLKYGIGLESHFDTPNIPYVRGSLDTLAQAKVPIWLTEIDVKKGPKQVEYLEEVMREGFAHPGVKGIVLWGAWHAKECYVMCLTDKNFKNLPVGDVVDKLITEWKAVPEDAKTDDKGVFEAELFHGEYNVTVKHKSLKEPLMHTVDLDSKSEATIRAKK

SEQ ID NO: 92 - protein, 360 aa, Phleum pratense
VSADKTAKVWDIMEDASGKVNRTLVCTGIGGVDDMLVGCLWQNDHLVTVSLGGTFNVFSASNPDKEPVSFAGHLKTVSSLTYFPQSNPRTMLSTSYDGVIIRWIQGVGYGGRLIRKNNTQIKCFVAAEEELITSGYDNMVFRIPLNGDQCGDAESVDVGGQPNALNIAVQQPEFALITTDSAIVLLHKSTVTSTTKVSYTITSSAVSPDGTEAIVGAQDGKLRIYSISGDTLTEEAVLERHRGAITSIHYSPDVSMFASADANREAVAWDRATREIKLKNMLFHTARINCLAWSPDSRLVATGSIDTCAIIYDVDKPASSRITIKGAHLGGVHGLTFADNDTLVTAGEDACVRVWKLVVP

SEQ ID NO: 93 - protein, 364 aa, Phleum pratense
VLTVSADKTAKVWDIMEDASGKVNRTLVCTGIGGVDDMLVGCLWQNDHLVTVSLGGTFNVFSASNPDKEPVSFAGHLKTVSSLTYFPQSNPRTMLSTSYDGVIIRWIQGVGYGGRLIRKNNTQIKCFVAAEEELITSGYDNMVFRIPLNGDQCGDAESVDVGGQPNALNIAVQQPEFALITTDSAIVLLHKSTVTSTTKVSYTITSSAVSPDGTEAIVGAQDGKLRIYSISGDTLTEEAVLERHRGAITSIHYSPDVSMFASADANREAVAWDRATREIKLKNMLFHTARINCLAWSPDSRLVATGSIDTCAIIYDVDKPASSRITIKGAHLGGVHGLTFADNDTLVTAGEDACVRVWKLVVPQ

SEQ ID NO: 94 - protein, 312 aa, Phleum pratense
LTVSADKTAKVWDIMEDASGKVNRTLVCTGIGGVDDMLVGCLWQNDHLVTVSLGGTFNVFSASNPDKEPVSFAGHLKTVSSLTYFPQSNPRTMLSTSYDGVIIRWIQGVGYGGRLIRKNNTQIKCFVAAEEELITSGYDNMVFRIPLNGDQCGDAESVDVGGQPNALNIAVQQPEFALITTDSAIVLLHKSTVTSTTKVSYTITSSAVSPDGTEAIVGAQDGKLRIYSISGDTLTEEAVLERHRGAITSIHYSPDVSMFASADANREAVAWDRATREIKLKNMLFHTARINCLAWSPDSRLVATGSIDTCAI

SEQ ID NO: 95 - protein, 265 aa, Phleum pratense
RGGRRERRRPKMAQLQETYACSPATERGRGILLGGDAKTDTIVYCAGRTFFFRRLDAPLDAWTYTEHAYPTTVARISPNGEWVASADVSGCVRVWGRNGDRALKAEFRPISGRVDDLRWSPDGLRIVVSGDGKGKSLVRAFMWDSGSTVGDFDGHSKRVLSCDFKPTRPFRIVTCGEDFLANYYEGPPFKFKHSIRDHSNFVNCIRYSPDGSKFITVSSDKRGLIYDGKTGDKIGELSSEDSHTGSIYAVSWSADSKQVLTVSAD

SEQ ID NO: 96 - protein, 620 aa, Phleum pratense
TLPDQSEEGERRRPKMAQLQETYACSPATERGRGILLGGDAKTDTIVYCAGRTFFFRRLDAPLDAWTYTEHAYPTTVARISPNGEWVASADVSGCVRVWGRNGDRALKAEFRPISGRVDDLRWSPDGLRIVVSGDGKGKSLVRAFMWDSGSTVGDFDGHSKRVLSCDFKPTRPFRIVTCGEDFLANYYEGPPFKFKHSIRDHSNFVNCIRYSPDGSKFITVSSDKRGLIYDGKTGDKIGELSSEDSHTGSIYAVSWSADSKQVLTVSADKTAKVWDIMEDASGKVNRTLVCTGIGGVDDMLVGCLWQNDHLVTVSLGGTFNVFSASNPDKEPVSFAGHLKTVSSLTYFPQSNPRTMLSTSYDGVIIRWIQGVGYGGRLIRKNNTQIKCFVAAEEELITSGYDNMVFRIPLNGDQCGDAESVDVGGQPNALNIAVQQPEFALITTDSAIVLLHKSTVTSTTKVSYTITSSAVSPDGTEAIVGAQDGKLRIYSISGDTLTEEAVLERHRGAITSIHYSPDVSMFASADANREAVAWDRATREIKLKNMLFHTARINCLAWSPDSRLVATGSIDTCAIIYDVDKPASSRITIKGAHLGGVHGLTFADNDTLVTAGEDACVRVW

SEQ ID NO: 97 - protein, 282 aa, Phleum pratense
GITTLHSHPTRGPTLPDQSEEGERRRPKMAQLQETYACSPATERGRGILLGGDAKTDTIVYCAGRTVFFRRLDAPLDAWTYTEHAYPTTVARISPNGEWVASADVSGCVRVWGRNGDRALKAEFRPISGRVDDLRWSPDGLRIVVSGDGKGKSLVRAFMWDSGSTVGDFDGHSKRVLSCDFKPTRPFRIVTCGEDFLANYYEGPPFKFKHSIRDHSNFVNCIRYSPDGSKFITVSSDKRGLIYDGKTGDKIGELSSEDSHTGSIYAVSWSADSKQVLTVSAD

SEQ ID NO: 98 - protein, 275 aa, Phleum pratense
GITTLHSHPTRGPTLPDQSEEGERRRPKMAQLQETYACSPATERGRGILLGGDAKTDTIVYCAGRTFFFRRLDAPLDAWTYTEHAYPTTVARISPNGEWVASADVSGCVRVWGRNGDRALKAEFRPISGRVDDLRWSPDGLRIVVSGDGKGKSLVRAFMWDSGSTVGDFDGHSKRVLSCDFKPTRPFRIVTCGEDFLANYYEGPPFKFKHSIRDHSNFVNCIRYSPDGSKFITVSSDKRGLIYDGKTGDKIGELSSEDSHTGSIYAVSWSADSKQ

SEQ ID NO: 99 - protein, 366 aa, Phleum pratense
SWSADSKQVLTVSADKTAKVWDIMEDASGKVNRTLVCTGIGGVDDMLVGCLWQNDHLVTVSLGGTFNVFSASNPDKEPVSFAGHLKTVSSLTYFPQSNPRTMLSTSYDGVIIRWIQGVGYGGRLIRKNNTQIKCFVAAEEELITSGYDNMVFRIPLNGDQCGDAESVDVGGQPNALNIAVQQPEFALITTDSAIVLLHKSTVTSTTKVSYTITSSAVSPDGTEAIVGAQDGKLRIYSISGDTLTEEAVLERHRGAITSIHYSPDVSMFASADANREAVAWDRATREIKLKNMLFHTARINCLAWSPDSRLVATGSIDTCAIIYDVDKPASSRITIKGAHLGGVHGLTFADNDTLVTAGEDACVRVW

SEQ ID NO: 100 - protein, 513 aa, Phleum pratense
SSAPWAAVVIQKFILSCSFIPGIQSYAKFSEMCRWDSGSTVGDFDGHSKRVLSCDFKPTRPFRIVTCGEDFLANYYEGPPFKFKHSIRDHSNFVNCIRYSPDGSKFITVSSDKRGLIYDGKTGDKIGELSSEDSHTGSIYAVSWSADSKQVLTVSADKTAKVWDIMEDASGKVNRTLVCTGIGGVDDMLVGCLWQNDHLVTVSLGGTFNVFSASNPDKEPVSFAGHLKTVSSLTYFPQSNPRTMLSTSYDGVIIRWIQGVGYGGRLIRKNNTQIKCFVAAEEELITSGYDNMVFRIPLNGDQCGDAESVDVGGQPNALNIAVQQPEFALITTDSAIVLLHKSTVTSTTKVSYTITSSAVSPDGTEAIVGAQDGKLRIYSISGDTLTEEAVLERHRGAITSIHYSPDVSMFASADANREAVAWDRATREIKLKNMLFHTARINCLAWSPDSRLVATGSIDTCAIIYDVDKPASSRITIKGAHLGGVHGLTFADNDTLVTAGEDACVRVWKLVVP

SEQ ID NO: 101 - protein, 509 aa, Phleum pratense
GSSAPWAAVVIQKFILSCSFIPGIQSYAKFSEMCRWDSGSTVGDFDGHSKRVLSCDFKPTRPFRIVTCGEDFLANYYEGPPFKFKHSIRDHSNFVNCIRYSPDGSKFITVSSDKRGLIYDGKTGDKIGELSSEDSHTGSIYAVSWSADSKQVLTVSADKTAKVWDIMEDASGKVNRTLVCTGIGGVDDMLVGCLWQNDHLVTVSLGGTFNVFSASNPDKEPVSFAGHLKTVSSLTYFPQSNPRTMLSTSYDGVIIRWIQGVGYGGRLIRKNNTQIKCFVAAEEELITSGYDNMVFRIPLNGDQCGDAESVDVGGQPNALNIAVQQPEFALITTDSAIVLLHKSTVTSTTKVSYTITSSAVSPDGTEAIVGAQDGKLRIYSISGDTLTEEAVLERHRGAITSIHYSPDVSMFASADANREAVAWDRATREIKLKNMLFHTARINCLAWSPDSRLVATGSIDTCAIIYDVDKPASSRITIKGAHLGGVHGLTFADNDTLVTAGEDACVRVW

SEQ ID NO: 102 - protein, 335 aa, Phleum pratense
CTGIGGVDDMLVGCLWQNDHLVTVSLGGTFNVFSASNPDKEPVSFAGHLKTVSSLTYFPQSNPRTMLSTSYDGVIIRWIQGVGYGGRLIRKNNTQIKCFVAAEEELITSGYDNMVFRIPLNGDQCGDAESVDVGGQPNALNIAVQQPEFALITTDSAIVLLHKSTVTSTTKVSYTITSSAVSPDGTEAIVGAQDGKLRIYSISGDTLTEEAVLERHRGAITSIHYSPDVSMFASADANREAVAWDRATREIKLKNMLFHTARINCLAWSPDSRLVATGSIDTCAIVYDVDKPASSRITIKGAHLGGVHGLTFADNDTLVTAGEDACVRVWKLVVP

SEQ ID NO: 103 - protein, 531 aa, Phleum pratense
CVRVWGRNGDRALKAEFRPISGRVDDLRWSPDGLRIVVSGDGKGKSLVRAFMWDSGSTVGDFDGHSKRVLSCDFKPTRPFRIVTCGEDFLANYYEGPPFKFKHSIRDHSNFVNCIRYSPDGSKFITVSSDKRGLIYDGKTGDKIGELSSEDSHTGSIYAVSWSADSKQVLTVSADKTAKVWDIMEDASGKVNRTLVCTGIGGVDDMLVGCLWQNDHLVTVSLGGTFNVFSASNPDKEPVSFAGHLKTVSSLTYFPQSNPRTMLSTSYDGVIIRWIQGVGYGGRLIRKNNTQIKCFVAAEEELITSGYDNMVFRIPLNGDQCGDAESVDVGGQPNALNIAVQQPEFALITTDSAIVLLHKSTVTSTTKVSYTITSSAVSPDGTEAIVGAQDGKLRIYSISGDTLTEEAVLERHRGAITSIHYSPDVSMFASADANREAVAWDRATREIKLKNMLFHTARINCLAWSPDSRLVATGSIDTCAIIYDVDKPASSRITIKGAHLGGVHGLTFADNDTLVTAGEDACVRVWKLVVP

SEQ ID NO: 104 - protein, 71 aa, Phleum pratense
GATIVVSGDGRYFSKDAVQIITKMAAANGVRRVWVGQDSLLSTPAVSAIIRERIAADGSKATGAFILTASH

SEQ ID NO: 105 - protein, 287 aa, Phleum pratense
RLDQVQLLVKGASERGAKRIRLHILADGRDVLDGSSVGFVETLENDLAQLREKGVDAQVASGGGRMYVTMDRYENDWDVVKRGWDAQVLGEAPYKFKSALEAVKTLRAEPKANDQYLPAFVIVDESGKSVGPIVDGDAVVTFNFRADRMVMLAKALEFADFDKFDRVRVPKIKYAGMLQYDGELKLPNKFLVSPPLIERTSGEYLVKNGVRTFACSETVKFGHVTFFWNGNRSGYFDETKEEYIEIPSDSGITFNEQPKMKALEIAEKTRDAILSGKFDQVRINLPN

SEQ ID NO: 106 - protein, 232 aa, Phleum pratense
ESFAEGTLHLIGLLSDGGVHSRLDQVQLLVKGASERGAKRIRLHILTDGRDVLDGSSVGFVETLENDLAQLREKGVDAQVASGGGRMYVTMDRYENDWDVVKRGWDAQVLGEAPYKFKSALEAVKTLRAEPKANDQYLPAFVIVDESGKSVGPIVDGDAVVTFNFRADRMVMLAKALEFADFDKFDRVRVPKIKYAGMLQYDGELKLPNKFLVSPPLIERTSGEYLVKNGVR

SEQ ID NO: 107 - protein, 184 aa, Phleum pratense
RDVLDGSSVGFVETLENDLAQLREKGVDAQVASGGGRMYVTMDRYENDWDVVKRGWDAQVLGEAPYKFKSALEAVKTLRAEPKANDQYLPAFVIVDESGKSVGPIVDGDAVVTFNFRADRMVMLAKALEFADFDKFDRVRVPKIKYAGMLQYDGELKLPNKFLVSPPLIERTSGEYLVKNGVRT

SEQ ID NO: 108 - protein, 150 aa, Phleum pratense
DAVVTFNFRADRMVMLAKALEFADFDKFDRVHVPKIKYAGMLQYDGELKLPNKFLVSPPLIERTSGEYLVKNGVRTFACSETVKFGHVTFFWNGNRSGYFDETKEEYIEIPSDSGITFNEQPKMKALEIAEKTRDAILSGKFDQVRINLP

SEQ ID NO: 109 - protein, 151 aa, Phleum pratense
DAVVTFNFRADRMVMLAKALEFADFDKFDRVRVPKIKYAGMLQYDGELKLPNKFLVSPPLIERTSGEYLVKNGVRTFACSETVKFGHVTFFWNGNRSGYFDETKEEYIEIPSDSGITFNEQPKMKALEIAEKTRDAILSGKFDQVRINLPN

SEQ ID NO: 110 - protein, 302 aa, Phleum pratense
ESENVKEFSYINLFLVSLYFQLLVKGASERGAKRIRLHILTDGRDVLDGSSVGFVETLENDLAQLREKGVDAQVASGGGRMYVTMDRYENDWDVVKRGWDAQVLGEAPYKFKSALEAVKTLRAEPKANDQYLPAFVIVDESGKSVGPIVDGDAVVTFNFRADRMVMLAKALEFADFDKFDRVRVPKIKYAGMLQYDGELKLPNKFLVSPPLIERTSGEYLVKNGVRTFACSETVKFGHVTFFWNGNRSGYFDETKEEYIEIPSDSGITFNEQPKMKALEIAEKTRDAILSGKFDQVRINLPN

SEQ ID NO: 111 - protein, 229 aa, Phleum pratense
VTSGGGRMYVTMDRYENDWDVVKRGWDAQVLGEAPYKFKSALEAVKALRAEPKANDQYLPAFVIVDESGKSVGPIVDGDAVVTFNFRADRMVMLAKALEFADFDKFDRVRVPKIKYAGMLQYDGELKLPNKFLVSPPLIERTSGEYLVKNGVRTFACSETVKFGHVTFFWNGNRSGYFDETKEEYIEIPSDSGITFNEQPKMKALEIAEKTRDAILSGKFDQVRINLPN

SEQ ID NO: 112 - protein, 152 aa, Phleum pratense
GRMYVTMDRYENDWDVVKRGWDAQVLGEAPYKFKSALEAVKTLRAEPKANDQYLPAFVIVDESGKSVGPIVDGDAVVTFNFRADRMVMLAKALEFADFDKFDRVRVPKIKYAGMLQYDGELKLPNKFLVSPPLIERTSGEYLVKNGVRTFAC

SEQ ID NO: 113 - protein, 141 aa, Phleum pratense
DAVVTFNFRADRMVMLAKALEFADFDKFDRVRVPKIKYAGMLQYDGELKLPNKFLVSPPLIERTSGEYLVKNGVRTFACSETVKFGHVTFFWNGNRSGYFDETKEEYIEIPSDSGITFNEQPKMKALEIAEKTRDAILSGK

SEQ ID NO: 114 - protein, 132 aa, Phleum pratense
KESFAEGTLHLIGLLSDGGVHSRLDQVQLLVKGASERGAKRIRLHILTDGRDVLDGSSVGFVETLENDLAQLREKGVDAQVASGGGRMYVTMDRYENDWDVVKRGWDAQVLGEAPYKFKSALEAVKTLRAEP

SEQ ID NO: 115 - protein, 37 aa, Phleum pratense
CSSDYKLLCSSFPVIPYHQGRNGNLSALACPLNQKKK

SEQ ID NO: 116 - protein, 40 aa, Phleum pratense
CSSDYKLLCSSFPVITYHQGRNGNLSALACPLNQKKKKKK

SEQ ID NO: 117 - protein, 40 aa, Phleum pratense; identical to SEQ ID NO: 116

SEQ ID NO: 118 - protein, 411 aa, Phleum pratense
AMDEEYDVIVLGTGLKECILSGLLSVDGLKVLHMDRNDYYGGESTSLNLTKIWKRFKGSEATPDHLGVSKEYNVDMVPKFMMANGALVRVLIRTSVTKYLNFKAVDGSFVYNNGKIHKVPATDVEALKSNLMGLFEKRRARKFFIYVQDYEEEDPKSHEGLDLHKVTTREVISKYGLEDDTVDFIGHALALHRDDNYLDEPAIDTVKRMKLYAESLARFQGGSPYIYPLYGLGELPQAFARLSAVYGGTYMLNKPECKVEFDESGKAFGVTSEGETAKCKKVVCDPSYLPDKVTKVGRVARAICIMKHPIPDTKDSHSVQIILPKKQLKRKSDMYVFCCSYAHNVAPKGKFIAFVSTEAETDKPEIELKPGIDLLGPVEETFFDIYDRYEPANAPEEDNCFVTNSYDATTH

SEQ ID NO: 119 - protein, 411 aa, Phleum pratense; identical to SEQ ID NO: 118

SEQ ID NO: 120 - protein, 175 aa, Phleum pratense
TTREVISKYGLEDDTVDFIGHALALHRDDNYLDEPAIDTVKRMKLYAESLARFQGGSPYIYPLYGLGELPQAFARLSAVYGGTYMLNKPECKVEFDESGKAFGVTSEGETAKCKKVVCDPSYLPDKVTKVGRVARAICIMKHPIPDTKDSHSVQIILPKKQLKRKSDMYVFCCSY

SEQ ID NO: 121 - protein, 342 aa, Phleum pratense
AMDEEYDVIVLGTGLKECILSGLLSVDGLKVLHMDRNDYYGGESTSLNLTKIWKRFKGSEATPDHLGVSKEYNVDMVPKFMMANGALVRVLIRTSVTKYLNFKAVDGSFVYNNGKIHKVPATDVEALKSNLMGLFEKRRARKFFIYVQDYEEEDPKSHEGLDLHKVTTREVISKYGLEDDTVDFIGHALALHRDDNYLDEPAIDTVKRMKLYAESLARFQGGSPYIYPLYGLGELPQAFARLSAVYGGTYMLNKPECKVEFDESGKAFGVTSEGETAKCKKVVCDPSYLPDKVTKVGRVARAICIMKHPIPDTKDSHSVQIILPKKQLKRKSDMYVFCCSYA

SEQ ID NO: 122 - protein, 426 aa, Phleum pratense
LLSVDGLKVLHMDRNDYYGGESTSLNLTKIWKRFKGSEATPDHLGVSKEYNVDMVPKFMMANGALVRVLIRTSVTKYLNFKAVDGSFVYNNGKIHKVPATDVEALKSNLMGLFEKRRARKFFIYVQDYEEEDPKSHEGLDLHKVTTREVISKYGLEDDTVDFIGHALALHRDDNYLDEPAIDTVKRMKLYAESLARFQGGSPYIYPLYGLGELPQAFARLSAVYGGTYMLNKPECKVEFDESGKAFGVTSEGETAKCKKVVCDPSYLPDKVTKVGRVARAICIMKHPIPDTKDSHSVQIILPKKQLKRKSDMYVFCCSYAHNVAPKGKFIAFVSTEAETDKPEIELKPGIDLLGPVEETFFDIYDRYEPANAPEEDNCFVTNSYDATTHFETTVKDVLALYSKITGKELDLSVDLNAASAGESEAA

SEQ ID NO: 123 - protein, 326 aa, Phleum pratense
MDEEYDVIVLGTGLKECILSGLLSVDGLKVLHMDRNDYYGGESTSLNLTKIWKRFKGSEATPDHLGVSKEYNVDMVPKFMMANGALVRVLIRTSVTKYLNFKAVDGSFVYNNGKIHKVPATDVEALKSNLMGLFEKRRARKFFIYVQDYEEEDPKSHEGLDLHKVTTREVISKYGLEDDTVDFIGHALALHRDDNYLDEPAIDTVKRMKLYAESLARFQGGSPYIYPLYGLGELPQAFARLSAVYGGTYMLNKPECKVEFDESGKAFGVTSEGETAKCKKVVCDPSYLPDKVTKVGRVARAICIMKHPIPDTKDSHSVQIILPKKQ

SEQ ID NO: 124 - protein, 25 aa, Phleum pratense
LLGYLLWVVAIRRPRPVRCFSLRAW

SEQ ID NO: 125 - protein, 25 aa, Phleum pratense
LLGYLLWVVAIRRPRPVRCFSLRAW

SEQ ID NO: 126 - protein, 25 aa, Phleum pratense
LLGYLLWVVAIRRPRPVRCFSLRAW

SEQ ID NO: 127 - protein, 25 aa, Phleum pratense
LLGYLLWVVAIRRPRPVRCFSLRAW

SEQ ID NO: 128 - protein, 16 aa, Phleum pratense
PRVNFFKRYNLTCVFW

SEQ ID NO: 129 - protein, 25 aa, Phleum pratense
PRVNFFKRYNLTCVFWSKKKKKNSS

SEQ ID NO: 130 - protein, 87 aa, Phleum pratense
RSDEKLLSVFREGVVYGAGIGPGVYDIHSPRIPSKEEIADDFALFRGTRPPRRPKKRPRTLQRQIDSLCPGFCLADVTPETYRIEER

SEQ ID NO: 131 - protein, 28 aa, Phleum pratense
NVCTRLSPFCCLYCILCCWYSMRLVTVM

SEQ ID NO: 132 - protein, 28 aa, Phleum pratense
NVCTRLSPFCCLYCILCCWYSMRLVTVM

SEQ ID NO: 133 - protein, 28 aa, Phleum pratense
NVCTRLSPFCCLYCILCCWYSMRLVTVM

SEQ ID NO: 134 - protein, 28 aa, Phleum pratense
NVCTRLSPFCCLYCILCCWYSMRLVTVM

SEQ ID NO: 135 - protein, 28 aa, Phleum pratense
NVCTRLSPFCCLYCILCCWYSMRLVTVM

SEQ ID NO: 136 - protein, 43 aa, Phleum pratense
NIPATWGAMEKLYDAGKARAIGVSNLASKKLGDLLAVARIPPA

SEQ ID NO: 137 - protein, 81 aa, Phleum pratense
DVNHATVKTSSGEKPVRELVQDDEWLNGPFIATVQQRGAAIIKARKLSSALSAASSACDHIRDWVLGTPEGTFVSMGVYSD

SEQ ID NO: 138 - protein, 362 aa, Phleum pratense
LKTEESRPSPKPNRIERRKREEHAPPPGQHIAMAASSRRASQLLGSAASRFLHSRGYAAAAAAPSPAVFVDKSTRVICQGITGKNGTFHTEQAIEYGTNMVGGVTPKKGGTEHLGLPVFNSVAEAKAETKANASVIYVPPPFAAAAIMEALEAELDLVVCITEGIPQHDMVKVKAALNRQSKTRLIGPNCPGIIKPGECKIGIMPGYIHKPGRIGIVSRSGTLTYEAVFQTTAVGLGQSTCVGMGGDPFNGTNFVDCLEKFVADPQTEGIVLIGEIGGTAEEDAAAFIQASKTDKPVVAFIAGLTAPPGRRMGHAGAIVSGGKGTAQDKIKALREAGVTVVESPAKIGSTMFEIFKQRGMVE

SEQ ID NO: 139 - protein, 357 aa, Phleum pratense
SRPSPKPNRIERRKREEHAPPPGQHIAMAASSRRASQLLGSAASRFLHSRGYAAAAAAPSPAVFVDKSTRVICQGITGKNGTFHTEQAIEYGTNMVGGVTPKKGGTEHLGLPVFNSVAEAKAETKANASVIYVPPPFAAAAIMEALEAELDLVVCITEGIPQHDMVKVKAALNRQSKTRLIGPNCPGIIKPGECKIGIMPGYIHKPGRIGIVSRSGTLTYEAVFQTTAVGLGQSTCVGMGGDPFNGTNFVDCLEKFVADPQTEGIVLIGEIGGTAEEDAAAFIQASKTDKPVVAFIAGLTAPPGRRMGHAGAIVSGGKGTAQDKIKALREAGVTVVESPAKIGSTMFEIFKQRGMVE

SEQ ID NO: 140 - protein, 302 aa, Phleum pratense
AAAPSPAVFVDKSTRVICQGITGKNGTFHTEQAIEYGTNMVGGVTPKKGGTEHLGLPVFNSVAEAKAETKANASVIYVPPPFAAAAIMEALEAELDLVVCITEGIPQHDMVKVKAALNRQSKTRLIGPNCPGIIKPGECKIGIMPGYIHKPGRIGIVSRSGTLTYEAVFQTTAVGLGQSTCVGMGGDPFNGTNFVDCLEKFVADPQTEGIVLIGEIGGTAEEDAAAFIQASKTDKPVVAFIAGLTAPPGRRMGHAGAIVSGGKGTAQDKIKALREAGVTVVESPAKIGSTMFEIFKQRGMVE

SEQ ID NO: 141 - protein, 159 aa, Phleum pratense
MPGYIHKPGRIGIVSRSGTLTYEAVFQTTAVGLGQSTCVGMGGDPFNGTNFVDCLEKFVADPQTEGIVLIGEIGGTAEEDAAAFIQASKTDKPVVAFIAGLTAPPGRRMGHAGAIVSGGKGTAQDKIKALREAGVTVVESPAKIGSTMFEIFKQRGMVE

SEQ ID NO: 142 - protein, 264 aa, Phleum pratense
QQVGGVTPKKGGTEHLGLPVFNSVAEAKAETKANASVIYVPPPFAAAAIMEALEAELDLVVCITEGIPQHDMVKVKAALNRQSKTRLIGPNCPGIIKPGECKIGIMPGYIHKPGRIGIVSRSGTLTYEAVFQTTAVGLGQSTCVGMGGDPFNGTNFVDCLEKFVADPQTEGIVLIGEIGGTAEEDAAAFIQASKTDKPVVAFIAGLTAPPGRRMGHAGAIVSGGKGTAQDKIKALREAGVTVVESPAKIGSTMFEIFKQRGMVE

SEQ ID NO: 143 - protein, 271 aa, Phleum pratense
EVLTSKRQQVGGVTPKKGGTEHLGLPVFNSVAEAKAETKANASVIYVPPPFAAAAIMEALEAELDLVVCITEGIPQHDMVKVKAALNRQSKTRLIGPNCPGIIKPGECKIGIMPGYIHKPGRIGIVSRSGTLTYEAVFQTTAVGLGQSTCVGMGGDPFNGTNFVDCLEKFVADPQTEGIVLIGEIGGTAEEDAAAFIQASKTDKPVVAFIAGLTAPPGRRMGHAGAIVSGGKGTAQDKIKALREAGVTVVESPAKIGSTMFEIFKQRGMVE

SEQ ID NO: 144 - protein, 43 aa, Phleum pratense
LRVQSDQAVFYQCYFDGYQDTLYTHAQRQFFRDCTVTGTIDFI

SEQ ID NO: 145 - protein, 52 aa, Phleum pratense
DGSGDFKTIKEALAKVPPKSASMYVMYIKEGTYKEYVTVPRTVTNLVMIGDG

SEQ ID NO: 146 - protein, 53 aa, Phleum pratense
VALRVQSDQAVFYQCYFDGYQDTLYTHAQRQFFRDCTVTGTIDFIFWITTWEL

SEQ ID NO: 147 - protein, 72 aa, Phleum pratense
MKDIRVENTAGADNHQAVALRVQSDQAVFYQCYFDGYQDTLYTHAQRQFFRDCTVTGTIDFIFGNSQVVIQN

SEQ ID NO: 148 - protein, 63 aa, Phleum pratense
MKDIRVENTAGADNHQAVALRVQSDQAVFYQCYFDGYQDTLYTHAQRQFFRDCTVTGTIDFIF

SEQ ID NO: 149 - protein, 63 aa, Phleum pratense
LAKVPPKSASMYVMYIKEGTYKEYVTVPRTVTNLVMIGDGAAKTIITGNKNFKMNLTSMVAVS

SEQ ID NO: 150 - protein, 57 aa, Phleum pratense
LAKVPPKSASMYVMYIKEGTYKEYVTVPRTVTNLVMIGDGAAKTIITGNKNFKMNLT

SEQ ID NO: 151 - protein, 57 aa, Phleum pratense; identical to SEQ ID NO: 150

SEQ ID NO: 152 - protein, 55 aa, Phleum pratense
DTATMEAIGNGFFMKDIRVENTAGADNHQAVALRVQSDQAVFYQCYFDGAVTEEL

SEQ ID NO: 153 - protein, 60 aa, Phleum pratense
LAKVPPKSASMYVMYIKEGTYKEYVTVPRTVTNLVMIGDGAAKTIITGNKNFKMNLTTKD

SEQ ID NO: 154 - protein, 70 aa, Phleum pratense
TKDTATMEAIGNGFFMKDIRVENTAGADNHQAVALRVQSDQAVFYQCYFDGYQDTLYTHAQRQFFRDCTV

SEQ ID NO: 155 - protein, 68 aa, Phleum pratense
DTATMEAIGNGFFMKDIRVENTAGADNHQAVALRVQSDQAVFYQCYFDGYQDTLYTHAQRQFFRDCTV

SEQ ID NO: 156 - protein, 59 aa, Phleum pratense
EAIGNGFFMKDIRVENTAGADNHQAVALRVQSDQAVFYQCYFDGYQDTLYTLMSFMKNP

SEQ ID NO: 157 - protein, 64 aa, Phleum pratense
AKVPPKSASMYVMYIKEGTYKEYVTVPRTVTNLVMIGDGAAKTIITGNKNFKMNLTSMVAVSLV

SEQ ID NO: 158 - protein, 63 aa, Phleum pratense
AKVPPKSASMYVMYIKEGTYKEYVTVPRTVTNLVMIGDGAAKTIITGNKNFKMNLTTKDTATM

SEQ ID NO: 159 - protein, 41 aa, Phleum pratense
KSASMYVMYIKEGTYKEYVTVPRTVTNLVMIGDGATKTIIT

SEQ ID NO: 160 - protein, 53 aa, Phleum pratense
VPPKSASMYVMYIKEGTYKEYVTVPRTVTNLVMIGDGAAKTIITGNKNFKMNL

SEQ ID NO: 161 - protein, 75 aa, Phleum pratense
DTATMEAIGNGFFMKDIRVENTAGADNHQAVALRVQSDQAVFYQCYFDGYQDTLYTHAQRQFFRDCTVTGTIDFI

SEQ ID NO: 162 - protein, 71 aa, Phleum pratense
SASMYVMYIKEGTYKEYVTVPRTVTNLVMIGDGAAKTIITGNKNFKMNLTTKDTATMEAIGNGFFMKDIRV

SEQ ID NO: 163 - protein, 71 aa, Phleum pratense
GSGDFKTIKEALAKVPPKSASMYVMYIKEGTYKEYVTVPRTVTNLVMIGDGAAKTIILKFLLPVMIVLAAP

SEQ ID NO: 164 - protein, 73 aa, Phleum pratense
GSGDFKTIKEALAKVPPKSASMYVMYIKEGTYKEYVTVPRTVTNLVMIGDGAAKTIITGNKNFKMNLTTKDTA

SEQ ID NO: 165 - protein, 226 aa, Phleum pratense
PALVPMALPNQGTVDYPSFKLVIVGDGGTGKTTFVKRHLTGEFEKKYEPTIGVEVHPLDFTTNCGKIRFYCWDTAGQEKFGGLRDGYYIHGQCAIIMFDVTSRLTYKNVPTWHRDLCRVCENIPIVLCGNKVDVKNRQVKAKQVTFHRKKNLQYYEISAKSNYNFEKPFLYLARKLAGDANIHFVEAVALKPPEVTFDLAMQQQHEAELAAAAAQPLPDDDDDLVE

SEQ ID NO: 166 - protein, 238 aa, Phleum pratense
PAPPPTQHLPSPPALVPMALPNQGTVDYPSFKLVIVGDGGTGKTTFVKRHLTGEFEKKYEPTIGVEVHPLDFTTNCGKIRFYCWDTAGQEKFGGLRDGYYIHGQCAIIMFDVTSRLTYKNVPTWHRDLCRVCENIPIVLCGNKVDVKNRQVKAKQVTFHRKKNLQYYEISAKSNYNFEKPFLYLARKLAGDANIHFVEAVALKPPEVTFDLAMQQQHEAELAAAAAQPLPDDDDDLVE

SEQ ID NO: 167 - protein, 246 aa, Phleum pratense
VLLLRRTPPRSSSYPTVASPPALVPMALPNQGTVDYPSFKLVIVGDGGTGKTTFVKRHLTGEFEKKYEPTIGVEVHPLDFTTNCGKIRFYCWDTAGQEKFGGLRDGYYIHGQCAIIMFDVTSRLTYKNVPTWHRDLCRVCENIPIVLCGNKVDVKNRQVKAKQVTFHRKKNLQYYEISAKSNYNFEKPFLYLARKLAGDANIHFVEAVALKPPEVTFDLAMQQQHEAELAAAAAQPLPDDDDDLVE

SEQ ID NO: 168 - protein, 237 aa, Phleum pratense
APPPTQQQPSPPALVPMALPNQGTVDYPSFKLVIVGDGGTGKTTFVKRHLTGEFEKKYEPTIGVEVHPLDFTTNCGKIRFYCWDTAGQEKFGGLRDGYYIHGQCAIIMFDVTSRLTYKNVPTWHRDLCRVCENIPIVLCGNKVDVKNRQVKAKQVTFHRKKNLQYYEISAKSNYNFEKPFLYLARKLAGDANIHFVEAVALKPPEVTFDLAMQQQHEAELAAAAAQPLPDDDDDLVE

SEQ ID NO: 169 - protein, 230 aa, Phleum pratense
MPSPPALVPMALPNQGTVDYPSFKLVIVGDGGTGKTTFVKRHLTGEFEKKYEPTIGVEVHPLDFTTNCGKIRFYCWDTAGQEKFGGLRDGYYIHGQCAIIMFDVTSRLTYKNVPTWHRDLCRVCENIPIVLCGNKVDVKNRQVKAKQVTFHRKKNLQYYEISAKSNYNFEKPFLYLARKLAGDANIHFVEAVALKPPEVTFDLAMQQQHEAELAAAAAQPLPDDDDDLVE

SEQ ID NO: 170 - protein, 239 aa, Phleum pratense
PPAPPPTQQQPSPPALVPMALPNQGTVDYPSFKLVIVGDGGTGKTTFVKRHLTGEFEKKYEPTIGVEVHPLDFTTNCGKIRFYCWDTAGQEKFGGLRDGYYIHGQCAIIMFDVTSRLTYKNVPTWHRDLCRVCENIPIVLCGNKVDVKNRQVKAKQVTFHRKKNLQYYEISAKSNYNFEKPFLYLARKLAGDANIHFVEAVALKPPEVTFDLAMQQQHEAELAAAAAQPLPDDDDDLVE

SEQ ID NO: 171 - protein, 265 aa, Phleum pratense
APTSASTGSPNSDSNTRVLLLRRTSPFSAPPPTQQLPSPPALVPMALPNQGTVDYPSFKLVIVGDGGTGKTTFVKRHLTGEFEKKYEPTIGVEVHPLDFTTNCGKIRFYCWDTAGQEKFGGLRDGYYIHGQCAIIMFDVTSRLTYKNVPTWHRDLCRVCENIPIVLCGNKVDVKNRQVKAKQVTFHRKKNLQYYEISAKSNYNFEKPFLYLARKLAGDANIHFVEAVALKPPEVTFDLAMQQQHEAELAAAAAQPLPDDDDDLVE

SEQ ID NO: 172 - protein, 229 aa, Phleum pratense
PSPPALVPMALPNQGTVDYPSFKLVIVGDGGTGKTTFVKRHLTGEFEKKYEPTIGVEVHPLDFTTNCGKIRFYCWDTAGQEKFGGLRDGYYIHGQCAIIMFDVTSRLTYKNVPTWHRDLCRVCENIPIVLCGNKVDVKNRQVKAKQVTFHRKKNLQYYEISAKSNYNFEKPFLYLARKLAGDANIHFVEAVALKPPEVTFDLAMQQQHEAELAAAAAQPLPDDDDDLVE

SEQ ID NO: 173 - protein, 120 aa, Phleum pratense
NQGTVDYPSFKLVIVGDGGTGKTTFVKRHLTGEFEKKYEPTIGVEVHPLDFTTNCGKIRFYCWDTAGQEKFGGLRDGYYIHGQCAIIMFDVTSRLTYKNVPTWHRDLCRVCENIPIVLCG

SEQ ID NO: 174 - protein, 217 aa, Phleum pratense
NQGTVDYPSFKLVIVGDGGTGKTTFVKRHLTGEFEKKYEPTIGVEVHPLDFTTNCGKIRFYCWDTAGQEKFGGLRDGYYIHGQCAIIMFDVTSRLTYKNVPTWHRDLCRVCENIPIVLCGNKVDVKNRQVKAKQVTFHRKKNLQYYEISAKSNYNFEKPFLYLARKLAGDANIHFVEAVALKPPEVTFDLAMQQQHEAELAAAAAQPLPDDDDDLVE

SEQ ID NO: 175 - protein, 27 aa, Phleum pratense
RTSSWGSGASLKIDRRELVTTRIYGFL

SEQ ID NO: 176 - protein, 27 aa, Phleum pratense
RTSSWGSGASLKIDRRELVTTRIYGFL

SEQ ID NO: 177 - protein, 247 aa, Phleum pratense
LVQRSRRFDLRFLHAAVAMATKRSVGTLGEADLKGKKVFLRADLNVPLDDAQKITDDTRIRASIPTIKFLLEKGAKVILASHLGRPKGVTPKFSLKPLVPRLSELLGVEVVMANDCIGEEVEKLAAALPEGGVLLLENVRFYKEEEKNDPEFAKKLASVADLYVNDAFGTAHRAHASTEGVTKFLRPSVAGFLMQKELDYLVGAVANPKKPFAAIVGGSKVSSKIGVIESLLAKVDILILGGGMIFT

SEQ ID NO: 178 - protein, 351 aa, Phleum pratense
SRSPPIRSRFLHAAVAMATKRSVGTLGEADLKGKKVFLRADLNVPLDDAQKITDDTRIRASIPTIKFLLEKGAKVILASHLGRPKGVTPKFSLKPLVPRLSELLGVEVVMANDCIGEEVEKLAAALPEGGVLLLENVRFYKEEEKNDPEFAKKLASVADLYVNDAFGTAHRAHASTEGVTKFLRPSVAGFLMQKELDYLVGAVANPKKPFAAIVGGSKVSSKIGVIESLLAKVDILILGGGMIFTFYKAQGKAVGNSLVEEDKLELATSLIETAKAKGVSLLLPTDVVVADKFAPDAESKTVPADAIPDGWMGLDVGPDSIKTFSEALDTTKTVIWNGPMGVFEFEKFAAG

SEQ ID NO: 179 - protein, 352 aa, Phleum pratense
SRSPPIRSRFLHAAVAMATKRSVGTLGEADLKGKKVFLRADLNVPLDDAQKITDDTRIRASIPTIKFLLEKGAKVILASHLGRPKGVTPKFSLKPLVPRLSELLGVEVVMANDCIGEEVEKLAAALPEGGVLLLENVRFYKEEEKNDPEFAKKLASVADLYVNDAFGTAHRAHASTEGVTKFLRPSVAGFLMQKELDYLVGAVANPKKPFAAIVGGSKVSSKIGVIESLLAKVDILILGGGMIFTFYKAQGKAVGKSLVEEDKLELATSLIETAKAKGVSLLLPTDVVVADKFAPDAESKTVPADAIPDGWMGLDVGPDSIKTFSEALDTTKTVIWNGPMGVFEFEKFAAGT

SEQ ID NO: 180 - protein, 354 aa, Phleum pratense
RPDRRRFDLGFLHAAVAMATKRSVGTLGEADLKGKKVFLRADLNVPLDDAQKITDDTRIRASIPTIKFLLEKGAKVILASHLGRPKGVTPKFSLKPLVPRLSELLGVEVVMANDCIGEEVEKLAAALPEGGVLLLENVRFYKEEEKNDPEFAKKLASVADLYVNDAFGTAHRAHASTEGVTKFLRPSVAGFLMQKELDYLVGAVANPKKPFAAIVGGSKVSSKIGVIESLLAKVDILILGGGMIFTFYKAQGKAVGNSLVEEDKLELATSLIETAKAKGVSLLLPTDVVVADKFAPDAESKTVSADAIPDGWMGLDVGPDSIKTFSEALDTTKTVIWNGPMGVFEFEKFAAGTD

SEQ ID NO: 181 - protein, 342 aa, Phleum pratense
LHAAVAMATKRSVGTLGEADLKGKKVFLRADLNVPLDDAQKITDDTRIRASIPTIKFLLEKGAKVILASHLGRPKGVTPKFSLKPLVPRLSELLGVEVVMANDCIGEEVEKLAAALPEGGVLLLENVRFYKEEEKNDPEFAKKLASVADLYVNDAFGTAHRAHASTEGVTKFLRPSVAGFLMQKELDYLVGAVANPKKPFAAIVGGSKVSSKIGVIESLLAKVDILILGGGMIFTFYKAQGKAVGNSLVEEDKLELATSLIETAKAKGVSLLLPTDVVVADKFAPDAESKTVSADAIPDGWMGLDVGPDSIKTFSEALDTTKTVIWNGPMGVFEFEKFAAGT

SEQ ID NO: 182 - protein, 338 aa, Phleum pratense
AMATKRSVGTLGEADLKGKKVFLRADLNVPLDDAQKITDDTRIRASIPTIKFLLEKGAKVILASHLGRPKGVTPKFSLKPLVPRLSELLGVEVVMANDCIGEEVEKLAAALPEGGVLLLENVRFYKEEEKNDPEFAKKLASVADLYVNDAFGTAHRAHASTEGVTKFLRPSVAGFLMQKELDYLVGAVANPKKPFAAIVGGSKVSSKIGVIESLLAKVDILILGGGMIFTFYKAQGKAVGNSLVEEDKLELATSLIETAKAKGVSLLLPTDVVVADKFAPDAESKTVSADAIPDGWMGLDVGPDSIKTFSEALDTTKTVIWNGPMGVFEFEKFAAGTD

SEQ ID NO: 183 - protein, 354 aa, Phleum pratense
SLSLSLSLSRPDRRRFDLRFLHAAVAMATKRSVGTLGEADLKGKKVFLRADLNVPLDDAQKITDDTRIRASIPTIKFLLEKGAKVILASHLGRPKGVTPKFSLKPLVPRLSELLGVEVVMANDCIGEEVEKLAAALPEGGVLLLENVRFYKEEEKNDPEFAKKLASVADLYVNDAFGTAHRAHASTEGVTKFLRPSVAGFLMQKELDYLVGAVANPKKPFAAIVGGSKVSSKIGVIESLLAKVDILILGGGMIFTFYKAQGKAVGKSLVEEDKLELATSLIETAKAKGVSLLLPTDVVVADKFAPDAESKTVSADAIPEGWMGLDVGPDSIKTFSEALDTTKTVIWNGPMGVFE

SEQ ID NO: 184 - protein, 353 aa, Phleum pratense
LPRPDRRRFDPGFSTQQAAMATKRSVGTLGEADLKGKKVFLRADLNVPLDDAQKITDDTRIRASIPTIKFLLEKGAKVILASHLGRPKGVTPKFSLKPLVPRLSELLGVEVVMANDCIGEEVEKLAAALPEGGVLLLENVRFYKEEEKNDPEFAKKLASVADLYVNDAFGTAHRAHASTEGVTKFLRPSVAGFLMQKELDYLVGAVANPKKPFAAIVGGSKVSSKIGVIESLLAKVDILILGGGMIFTFYKAQGKAVGKSLVEEDKLELATSLIETAKAKGVSLLLPTDVVVADKFAPDAESKTVSADAIPEGWMGLDVGPDSIKTFSEALDTTKTVIWNGPMGVFEFEKFAA

SEQ ID NO: 185 - protein, 353 aa, Phleum pratense; identical to SEQ ID NO: 184

SEQ ID NO: 186 - protein, 273 aa, Phleum pratense
FQGRPKGVTPKFSLKPLVPRLSELLGVEVVMANDCIGEEVEKLAAALPEGGVLLLENVRFYKEEEKNDPEFAKKLASVADLYVNDAFGTAHRAHASTEGVTKFLRPSVAGFLMQKELDYLVGAVANPKKPFAAIVGGSKVSSKIGVIESLLAKVDILILGGGMIFTFYKAQGKAVGKSLVEEDKLELATSLIETAKAKGVSLLLPTDVVVADKFAPDAESKTVSADAIPDGWMGLDVGPDSIKTFSEALDTTKTVIWNGPMGVFEFEKFAAGT

SEQ ID NO: 187 - protein, 336 aa, Phleum pratense
AMATKRSVGTLGEADLKGKKVFLRADLNVPLDDAQKITDDTRIRASIPTIKFLLEKGAKVILASHLGRPKGVTPKFSLKPLVPRLSELLGVEVVMANDCIGEEVEKLAAALPEGGVLLLENVRFYKEEEKNDPEFAKKLASVADLYVNDAFGTAHRAHASTEGVTKFLRPSVAGFLMQKELDYLVGAVANPKKPFAAIVGGSKVSSKIGVIESLLAKVDILILGGGMIFTFYKAQGKAVGKSLVEEDKLELATSLIETAKAKGVSLLLPTDVVVADKFAPDAESKTVSADAIPDGWMGLDVGPDSIKTFSEALDTTKTVIWNGPMGVFEFEKFAAG

SEQ ID NO: 188 - protein, 278 aa, Phleum pratense
VILASHLGRPKGVTPKFSLKPLVPRLSELLGVEVVMANDCIGEEVEKLAAALPEGGVLLLENVRFYKEEEKNDPEFAKKLASVADLYVNDAFGTAHRAHASTEGVTKFLRPSVAGFLMQKELDYLVGAVANPKKPFAAIVGGSKVSSKIGVIESLLAKVDILILGGGMIFTFYKAQGKAVGKSLVEEDKLELATSLIETAKAKGVSLLLPTDVVVADKFAPDAESKTVSADAIPDGWMGLDVGPDSIKTFSEALDTTKTVIWNGPMGVFEFEKFAAGT

SEQ ID NO: 189 - protein, 279 aa, Phleum pratense
VILASHLGRPKGVTPKFSLKPLVPRLSELLGVEVVMANDCIGEEVEKLAAALPEGGVLLLENVRFYKEEEKNDPEFAKKLASVADLYVNDAFGTAHRAHASTEGVTKFLRPSVAGFLMQKELDYLVGAVANPKKPFAAIVGGSKVSSKIGVIESLLAKVDILILGGGMIFTFYKAQGKAVGKSLVEEDKLELATSLIETAKAKGVSLLLPTDVVVADKFAPDAESKTVSADAIPDGWMGLDVGPDSIKTFSEALDTTKTVIWNGPMGVFEFEKFAAGTD

SEQ ID NO: 190 - protein, 288 aa, Phleum pratense
LDDAQKITDDTRIRASIPTIKFLLEKGAKVILASHLGRPKGVTPKFSLKPLVPRLSELLGVEVVMANDCIGEEVEKLAAALPEGGVLLLENVRFYKEEEKNDPEFAKKLASVADLYVNDAFGTAHRAHASTEGVTKFLRPSVAGFLMQKELDYLVGAVANPKKPFAAIVGGSKVSSKIGVIESLLAKVDILILGGGMIFTFYKAQGKAVGKSLVEEDKLELATSLIETAKAKGVSLLLPTDVVVADKFAPDAESKTVSADAIPDGWMGLDVGPDSIKTFSEALDTTKT

SEQ ID NO: 191 - protein, 16 aa, Phleum pratense
KSAPALRILRSFPSHS

SEQ ID NO: 192 - protein, 68 aa, Phleum pratense
VAAIKEESEGNLKGILGYVDEDLVSTDFQGDSRSSIFDAKAGIALNDNFVKLVSWYDNEWGYSTRVVD

SEQ ID NO: 193 - protein, 66 aa, Phleum pratense
YMFKYDTVHGQWKHHDVKVKDAKTLLFGEKEVAVFGCRNPEEIPWGAAGADYVVESTGVFTDKDKA

SEQ ID NO: 194 - protein, 84 aa, Phleum pratense
AATYEQIKAAIKEESEGNLKGILGYVDEDLVSTDFQGDSRSSIFDAKAGIALNDNFVKLVSWYDNEWGYSTRVVDLIRHIHATK

SEQ ID NO: 195 - protein, 77 aa, Phleum pratense
VAAIKEESEGNLKGILGYVDEDLVSTDFQGDSRSSIFDAKAGIALNDNFVKLVSWYDNEWGYSTRVVDLIRHIHATK

SEQ ID NO: 196 - protein, 129 aa, Phleum pratense
ATQKTVDGPSSKDWRGGRAASFNIIPSSTGAAKAVGKVLPVLNGKLTGMAFRVPTVDVSVVDLTVRLEKAATYEQIKAAIKEESEGNLKGILGYVDEDLVSTDFQGDSRSSIFDAKAGNALNDNFVKLV

SEQ ID NO: 197 - protein, 60 aa, Phleum pratense
TYMFKYDTVHGQWKHHDVKVKDAKTLLFGEKEVAVFGCRNPEEIPWGAAGADYVVESTGV

SEQ ID NO: 198 - protein, 72 aa, Phleum pratense
EESEGNLKGILGYVDEDLVSTDFQGDSRSSIFDAKAGIALNDNFVKLVSWYDNEWGYSTRVVDLIRHIHATK

SEQ ID NO: 199 - protein, 290 aa, Phleum pratense
VNDPFITTDYMTYMFKYDTVHGQWKHHDVKVKDAKTLLFGEKEVAVFGCRNPEEIPWGAAGADYVVESTGVFTDKDKAAAHIKGGAKKVIISAPSKDAPMFVCGVNEKEYTSDITIVSNASCTTNCLAPLAKVINDRFGIVEGLMTTVHAMTATQKTVDGPSSKDWRGGRAASFNIIPSSTGAAKAVGKVLPVLNGKLTGMAFRVPTVDVSVVDLTVRLEKAATYEQIKAAIKEESEGNLKGILGYVDEDLVSTDFQGDSRSSIFDAKAGIALNDNFVKLVSWYDNEWGY

SEQ ID NO: 200 - protein, 222 aa, Phleum pratense
DVELVAVNDPFITTDYMTYMFKYDTVHGQWKHHDVKVKDAKTLLFGEKEVAVFGCRNPEEIPWGAAGADYVVESTGVFTDKDKAAAHIKGGAKKVIISAPSKDAPMFVCGVNEKEYTSDITIVSNASCTTNCLAPLAKVINDRFGIVEGLMTTVHAMTATQKTVDGPSSKDWRGGRAASFNIIPSSTGAAKAVGKVLPVLNGKLTGMAFRVPTVDVSVVDLT

SEQ ID NO: 201 - protein, 84 aa, Phleum pratense
DVELVAVNDPFITTDYMTYMFKYDTVHGQWKHHDVKVKDAKTLLFGEKEVAVFGCRNPEEIPWGAAGADYVVESTGVFTDKDKA

SEQ ID NO: 202 - protein, 202 aa, Phleum pratense
DVELVAVNDPFITTDYMTYMFKYDTVHGQWKHHDVKVKDAKTLLFGEKEVAVFGCRNPEEIPWGAAGADYVVESTGVFTDKDKAAAHIKGGAKKVIISAPSKDAPMFVCGVNEKEYTSDITIVSNASCTTNCLAPLAKVINDRFGIVEGLMTTVHAMTATQKTVDGPSSKDWRGGRAASFNIIPSSTGAAKAVGKVLPVLNG

SEQ ID NO: 203 - protein, 286 aa, Phleum pratense
DVELVAVNDPFITTDYMTYMFKYDTVHGQWKHHDVKVKDAKTLLFGEKEVAVFGCRNPEEIPWGAAGADYVVESTGVFTDKDKAAAHIKGGAKKVIISAPSKDAPMFVCGVNEKEYTSDITIVSNASCTTNCLAPLAKVINDRFGIVEGLMTTVHAMTATQKTVDGPSSKDWRGGRAASFNIIPSSTGAAKAVGKVLPVLNGKLTGMAFRVPTVDVSVVDLTVRLEKAATYEQIKAAIKEESEGNLKGILGYVDEDLVSTDFQGDSRSSIFDAKAGIALNDNFVKL

SEQ ID NO: 204 - protein, 69 aa, Phleum pratense
PGSDAKKVAPEVIAEYTVRTLQRTVPPAVPAIVFLSGGQSEEEATVNLNAMYKLQTKKPWFLSFSFGRA

SEQ ID NO: 205 - protein, 106 aa, Phleum pratense
VTPGSDAKKVAPEVIAEYTVRTLQRTVPPAVPAIVFLSGGQSEEEATVNLNAMNKLQTKKPWFLSFSFGRALQQSTLKAWSGKEENVEKAQKAFLVRCKANSEATL

SEQ ID NO: 206 - protein, 74 aa, Phleum pratense
KPNMVTPGSDAKKVAPEVIAEYTVRTLQRTVPPAVPAIVFLSGGQSEEEATVNLNAMNKLQTKKPWFLSFSFGR

SEQ ID NO: 207 - protein, 98 aa, Phleum pratense
LKPNMVTPGSDAKKVAPEVIAEYTVRTLQRTVPPAVPAIVFLSGGQSEEEATVNLNAMNKLQTKKPWFLSFSFGRALQQSTLKAWSGKEENVEKAQKA

SEQ ID NO: 208 - protein, 202 aa, Phleum pratense
SQLSIDQNAQGLARYAIICQENGLVPIVEPEILVDGPHDIERCAYVTEVVLAACYKALNDQHVLLEGSLLKPNMVTPGSDAKKVAPEVIAEYTVRTLQRTVPPAVPAIVFLSGGQSEEEATVNLNAMNKLQTKKPWFLSFSFGRALQQSTLKAWSGKEENVEKAQKAFLVRCKANSEATLGTYKGDATLGEGASESLHVKDY

SEQ ID NO: 209 - protein, 130 aa, Phleum pratense
VTPGSDAKKVAPEVIAEYTVRTLQRTVPPAVPAIVFLSGGQSEEEATVNLNAMNKLQTKKPWFLSFSFGRALQQSTLKAWSGKEENVEKAQKAFLVRCKANSEATLGTYKGDATLGEGASESLHVKDYKY

SEQ ID NO: 210 - protein, 63 aa, Phleum pratense
KETTTQGHDDLGKRCAKYYEAGARFAKWRAVLKIGPNEPSQLSIDQNAQGLARYAMLGFRREP

SEQ ID NO: 211 - protein, 76 aa, Phleum pratense
RFAKWRAVLKIGPNEPSQLSIDQNAQGLARYAIICQENGLVPIVEPEILVDGPHDIERCAYVTEVVLAACYKALND

SEQ ID NO: 212 - protein, 50 aa, Phleum pratense
GSLLKPNMVTPGSDAKKVAPEVIAEYTVRTLQRTVPPAVPAIVFLSGGQS

SEQ ID NO: 213 - protein, 201 aa, Phleum pratense
PFANPPQTSTMSAYCGKYKDELIKNAAYIGTPGKGILAADESTGTIGKRFASINVENVEDNRRALRELLFTTPGALQHISGVILFEETLYQSSKAGKPFVDILKENNVLPGIKVDKGTVELAGTDKETTTQGHDDLGKRCAKYYEAGARFAKWRAVLKIGPNEPSQLSIDQNAQGLARYAIICQENGLVPIVEPEILVDGP

SEQ ID NO: 214 - protein, 51 aa, Phleum pratense
VIPPAPHLKRWNRVVDTNLESPNDIVPEGAPFTGSGYRIAPYSSILLKATS

SEQ ID NO: 215 - protein, 51 aa, Phleum pratense; identical to SEQ ID NO: 214

SEQ ID NO: 216 - protein, 405 aa, Phleum pratense
GGVAAGYAAREFAKQGVQPGELAIISKESVAPYERPALSKGYLFPQNAARLPGFHTCVGSGGEKLLPEWYTEKGIELILSTEIVKADLASKTLTSAAGATFTYETLLIATGSSTIKLTDFGVQGAEANNILYLRDINDADKLVAAMQAKKDGKAVVVGGGYIGLELSAALKLNNFDVTMVYPEPWCMPRLFTAGIAHFYEGYYASKGINIVKGTVASGFDADANGDVAVVKLKDGRVLDANIVIVGVGGRPLTGLFKGQVDEEKGGLKTDTFFETSVAGVYAIGDVASFPMKLYNEPRRVEHVDHARKSAEQAVKAIKAKESGETVAEYDYLPYFYSRSFDIAWQFYGDNVGESVLFGDNDPAAAKAKFGTYWVKDGKVVGVFLEGGSADENQAIAKVARAQPPA

SEQ ID NO: 217 - protein, 398 aa, Phleum pratense
GGVAAGYAAREFAKQGVQPGELAIISKESVAPYERPALSKGYLFPQNAARLPGFHTCVGSGGEKLLPEWYTEKGIELILSTEIVKADLASKTLTSAAGATFTYETLLIATGSSTIKLTDFGVQGAEANNILYLRDINDADKLVAAMQAKKDGKAVVVGGGYIGLELSAALKLNNFDVTMVYPEPWCMPRLFTAGIAHFYEGYYASKGINIVKGTVASGFDADANGDVAVVKLKDGRVLDANIVIVGVGGRPLTGLFKGQVDEEKGGLKTDTFFETSVAGVYAIGDVASFPMKLYNEPRRVEHVDHARKSAEQAVKAIKAKESGETVAEYDYLPYFYSRSFDIAWQFYGDNVGESVLFGDNDPAAAKAKFGTYWVKDGKVVGVFLEGGSADENQAIAKV

SEQ ID NO: 218 - protein, 443 aa, Phleum pratense
LPRSFIHPSTDRSLAEMASEKHFKYVILGGGVAAGYAAREFAKQGVQPGELAIISKESVAPYERPALSKGYLFPQNAARLPGFHTCVGSGGEKLLPEWYTEKGIELILSTEIVKADLASKTLTSAAGATFTYETLLIATGSSTIKLTDFGVQGAEANNILYLRDINDADKLVAAMQAKKDGKAVVVGGGYIGLELSAALKLNNFDVTMVYPEPWCMPRLFTAGIAHFYEGYYASKGINIVKGTVASGFDADANGDVAVVKLKDGRVLDANIVIVGVGGRPLTGLFKGQVDEEKGGLKTDTFFETSVAGVYAIGDVASFPMKLYNEPRRVEHVDHARKSAEQAVKAIKAKESGETVAEYDYLPYFYSRSFDIAWQFYGDNVGESVLFGDNDPAAAKAKFGTYWVKDGKVVGVFLEGGSADENQAIAKVARAQPPASDLEALGKE

SEQ ID NO: 219 - protein, 351 aa, Phleum pratense
RRRRRGYAAREFAKQGVQPGELAIISKESVAPYERPALSKGYLFPQNAARLPGFHTCVGSGGEKLLPEWYTEKGIELILSTEIVKADLASKTLTSAAGATFTYETLLIATGSSTIKLTDFGVQGAEANNILYLRDINDADKLVAAMQAKKDGKAVVVGGGYIGLELSAALKLNNFDVTMVYPEPWCMPRLFTAGIAHFYEGYYASKGINIVKGTVASGFDADANGDVAVVKLKDGRVLDANIVIVGVGGRPLTGLFKGQVDEEKGGLKTDTFFETSVAGVYAIGDVASFPMKLYNEPRRVEHVDHARKSAEQAVKAIKAKESGETVAEYDYLPYFYSRSFDIAWQFYGDNV

SEQ ID NO: 220 - protein, 379 aa, Phleum pratense
LAIISKESVAPYERPALSKGYLFPQNAARLPGFHTCVGSGGEKLLPEWYTEKGIELILSTEIVKADLASKTLTSAAGATFTYETLLIATGSSTIKLTDFGVQGAEANNILYLRDINDADKLVAAMQAKKDGKAVVVGGGYIGLELSAALKLNNFDVTMVYPEPWCMPRLFTAGIAHFYEGYYASKGINIVKGTVASGFDADANGDVAVVKLKDGRVLDANIVIVGVGGRPLTGLFKGQVDEEKGGLKTDTFFETSVAGVYAIGDVASFPMKLYNEPRRVEHVDHARKSAEQAVKAIKAKESGETVAEYDYLPYFYSRSFDIAWQFYGDNVGESVLFGDNDPAAAKAKFGTYWVKDGKVVGVFLEGGSADENQAIAKVAR

SEQ ID NO: 221 - protein, 412 aa, Phleum pratense
KQRASAAREFAKQGVQPGELAIISKESVAPYERPALSKGYLFPQNAARLPGFHTCVGSGGEKLLPEWYTEKGIELILSTEIVKADLASKTLTSAAGATFTYETLLIATGSSTIKLTDFGVQGAEANNILYLRDINDADKLVAAMQAKKDGKAVVVGGGYIGLELSAALKLNNFDVTMVYPEPWCMPRLFTAGIAHFYEGYYASKGINIVKGTVASGFDADANGDVAVVKLKDGRVLDANIVIVGVGGRPLTGLFKGQVDEEKGGLKTDTFFETSVAGVYAIGDVASFPMKLYNEPRRVEHVDHARKSAEQAVKAIKAKESGETVAEYDYLPYFYSRSFDIAWQFYGDNVGESVLFGDNDPAAAKAKFGTYWVKDGKVVGVFLEGGSADENQAIAKVARAQPPASDLEALGKE

SEQ ID NO: 222 - protein, 416 aa, Phleum pratense
IHPSTDRWLAEMASEKHFKYVILGGGVAAGYAAREFAKQGVQPGELAIISKESVAPYERPALSKGYLFPQNAARLPGFHTCVGSGGEKLLPEWYTEKGIELILSTEIVKADLASKTLTSAAGATFTYETLLIATGSSTIKLTDFGVQGAEANNILYLRDINDADKLVAAMQAKKDGKAVVVGGGYIGLELSAALKLNNFDVTMVYPEPWCMPRLFTAGIAHFYEGYYASKGINIVKGTVASGFDADANGDVAVVKLKDGRVLDANIVIVGVGGRPLTGLFKGQVDEEKGGLKTDTFFETSVAGVYAIGDVASFPMKLYNEPRRVEHVDHARKSAEQAVKAIKAKESGETVAEYDYLPYFYSRSFDIAWQFYGDNVGESVLFGDNDPAAAKAKFGTYWVKDGKVVGVFLEGGSADEN

SEQ ID NO: 223 - protein, 426 aa, Phleum pratense
SFRFFLAHSSIHPSTDRSLAEMASEKHFKYVILGGGVAAGYAAREFAKQGVQPGELAIISKESVAPYERPALSKGYLFPQNAARLPGFHTCVGSGGEKLLPEWYTEKGIELILSTEIVKADLASKTLTSAAGATFTYETLLIATGSSTIKLTDFGVQGAEANNILYLRDINDADKLVAAMQAKKDGKAVVVGGGYIGLELSAALKLNNFDVTMVYPEPWCMPRLFTAGIAHFYEGYYASKGINIVKGTVASGFDADANGDVAVVKLKDGRVLDANIVIVGVGGRPLTGLFKGQVDEEKGGLKTDTFFETSVAGVYAIGDVASFPMKLYNEPRRVEHVDHARKSAEQAVKAIKAKESGETVAEYDYLPYFYSRSFDIAWQFYGDNVGESVLFGDNDPAAAKAKFGTYWVKDGKVVGVFLEGGSADEN

SEQ ID NO: 224 - protein, 433 aa, Phleum pratense
SSFRFFLAHSSIHPSTDRSLAEMASEKHFKYVILGGGVAAGYAAREFAKQGVQPGELAIISKESVAPYERPALSKGYLFPQNAARLPGFHTCVGSGGEKLLPEWYTEKGIELILSTEIVKADLASKTLTSAAGATFTYETLLIATGSSTIKLTDFGVQGAEANNILYLRDINDADKLVAAMQAKKDGKAVVVGGGYIGLELSAALKLNNFDVTMVYPEPWCMPRLFTAGIAHFYEGYYASKGINIVKGTVASGFDADANGDVAVVKLKDGRVLDANIVIVGVGGRPLTGLFKGQVDEEKGGLKTDTFFETSVAGVYAIGDVASFPMKLYNEPRRVEHVDHARKSAEQAVKAIKAKESGETVAEYDYLPYFYSRSFDIAWQFYGDNVGESVLFGDNDPAAAKAKFGTYWVKDGKVVGVFLEGGSADENQAIAKV

SEQ ID NO: 225 - protein, 391 aa, Phleum pratense
AAREFAKQGVQPGELAIISKESVAPYERPALSKGYLFPQNAARLPGFHTCVGSGGEKLLPEWYTEKGIELILSTEIVKADLASKTLTSAAGATFTYETLLIATGSSTIKLTDFGVQGAEANNILYLRDINDADKLVAAMQAKKDGKAVVVGGGYIGLELSAALKLNNFDVTMVYPEPWCMPRLFTAGIAHFYEGYYASKGITIVKGTVASGFDADANGDVAVVKLKDGRVLDANIVIVGVGGRPLTGLFKGQVDEEKGGLKTDTFFETSVAGVYAIGDVASFPMKLYNEPRRVEHVDHARKSAEQAVKAIKAKESGETVAEYDYLPYFYSRSFDIAWQFYGDNVGESVLFGDNDPAAAKAKFGTYWVKDGKVVGVFLEGGSADENQAIAKV

SEQ ID NO: 226 - protein, 351 aa, Phleum pratense
MAGGGVEDVYGEDRATEEQFVTPWSFSVASGHSLLRDPRHNKGLAFSEAERDAHYLRGLLPPAIVSQEHQEKKIMHNLRQYTVPLQRYIAMMDLQERNERLFYKLLIDNVEELLPVVYTPVVGEACQKYGSIYRRPQGLYISLKDKGKVLEVLKNWPERSIQVIVVTDGERILGLGDLGCQGMGIPVGKLSLYTALGGVRPSACLPITIDVGTNNQTLLDDEYYIGLKQRRATGEEYHELLQEFMNAVKQNYGEKVLVQFEDFANHNAFDLLAKYSKSHLVFNDDIQGTASVVLAGLLAALKVIGGGLADQTYLFLGAGEAGTGIAELIALEMSKHTDLPLDDCRKKIWLV

SEQ ID NO: 227 - protein, 353 aa, Phleum pratense
REMAGGGVEDVYGEDRATEEQFVTPWSFSVASGHSLLRDPRHNKGLAFSEAERDAHYLRGLLPPAIVSQEHQEKKIMHNLRQYTVPLQRYIAMMDLQERNERLFYKLLIDNVEELLPVVYTPVVGEACQKYGSIYRRPQGLYISLKDKGKVLEVLKNWPERSIQVIVVTDGERILGLGDLGCQGMGIPVGKLSLYTALGGVRPSACLPITIDVGTNNQTLLDDEYYIGLKQRRATGEEYHELLQEFMNAVKQNYGEKVLVQFEDFANHNAFDLLAKYSKSHLVFNDDIQGTASVVLAGLLAALKVIGGGLADQTYLFLGAGEAGTGIAELIALEMSKHTDLPLDDCRKKIWLV

SEQ ID NO: 228 - protein, 351 aa, Phleum pratense; identical to SEQ ID NO: 226

SEQ ID NO: 229 - protein, 351 aa, Phleum pratense; identical to SEQ ID NO: 226

SEQ ID NO: 230 - protein, 351 aa, Phleum pratense; identical to SEQ ID NO: 226

SEQ ID NO: 231 - protein, 572 aa, Phleum pratense
REMAGGGVEDVYGEDRATEEQFVTPWSFSVASGHSLLRDPRHNKGLAFSEAERDAHYLRGLLPPAIVSQEHQEKKIMHNLRQYTVPLQRYIAMMDLQERNERLFYKLLIDNVEELLPVVYTPVVGEACQKYGSIYRRPQGLYISLKDKGKVLEVLKNWPERSIQVIVVTDGERILGLGDLGCQGMGIPVGKLSLYTALGGVRPSACLPITIDVGTNNQTLLDDEYYIGLKQRRATGEEYHELLQEFMNAVKQNYGEKVLVQFEDFANHNAFDLLAKYSKSHLVFNDDIQGTASVVLAGLLAALKVIGGGLADQTYLFLGAGEAGTGIAELIALEMSKHTDLPLDDCRKKIWLVDSKGLLVESRKESLQHFKKPFAHEHEPLTTLLEAVQSLKPTVLIGTSGVGKTFTQEVVEAMASFNEKPVIFSLSNPTSHSECTAEEAYTWTKGTAVFASGSPFDPVEYEGKTYVPGQSNNAYVFPGFGLGVVISGAIRVHDDMLLAASEALAEQVSQENFDKGLIFPPFTNIRKISANIAAKVAAKAYDLGLASRLPRPDDLVKYAESCMYTPLYRSYR

SEQ ID NO: 232 - protein, 483 aa, Phleum pratense
REMAGGGVEDVYGEDRATEEQFVTPWSFSVASGHSLLRDPRHNKGLAFSEAERDAHYLRGLLPPAIVSQEHQEKKIMHNLRQYTVPLQRYIAMMDLQERNERLFYKLLIDNVEELLPVVYTPVVGEACQKYGSIYRRPQGLYISLKDKGKVLEVLKNWPERSIQVIVVTDGERILGLGDLGCQGMGIPVGKLSLYTALGGVRPSACLPITIDVGTNNQTLLDDEYYIGLKQRRATGEEYHELLQEFMNAVKQNYGEKVLVQFEDFANHNAFDLLAKYSKSHLVFNDDIQGTASVVLAGLLAALKVIGGGLADQTYLFLGAGEAGTGIAELIALEMSKHTDLPLDDCRKKIWLVDSKGLLVESRKESLQHFKKPFAHEHEPLTTLLEAVQSLKPTVLIGTSGVGKTFTQEVVEAMASFNEKPVIFSLSNPTSHSECTAEEAYTWTKGTAVFASGSPFDPVEYEGKTYVPGQSNNAYVFPGFGLG

SEQ ID NO: 233 - protein, 510 aa, Phleum pratense
PEMAGGGVEDVYGEDRATEEQFVTPWSFSVASGHSLLRDPRHNKGLAFSEAERDAHYLRGLLPPAIVSQEHQEKKIMHNLRQYTVPLQRYIAMMDLQERNERLFYKLLIDNVEELLPVVYTPVVGEACQKYGSIYRRPQGLYISLKDKGKVLEVLKNWPERSIQVIVVTDGERILGLGDLGCQGMGIPVGKLSLYTALGGVRPSACLPITIDVGTNNQTLLDDEYYIGLKQRRATGEEYHELLQEFMNAVKQNYGEKVLVQFEDFANHNAFDLLAKYSKSHLVFNDDIQGTASVVLAGLLAALKVIGGGLADQTYLFLGAGEAGTGIAELIALEMSKHTDLPLDDCRKKIWLVDSKGLLVESRKESLQHFKKPFAHEHEPLTTLLEAVQSLKPTVLIGTSGVGKTFTQEVVEAMASFNEKPVIFSLSNPTSHSECTAEEAYTWTKGTAVFASGSPFDPVEYEGKTYVPGQSNNAYVFPGFGLGVVISGAIRVHDDMLLAASEALAEQVSQ

SEQ ID NO: 234 - protein, 572 aa, Phleum pratense
PEMAGGGVEDVYGEDRATEEQFVTPWSFSVASGHSLLRDPRHNKGLAFSEAERDAHYLRGLLPPAIVSQEHQEKKIMHNLRQYTVPLQRYIAMMDLQERNERLFYKLLIDNVEELLPVVYTPVVGEACQKYGSIYRRPQGLYISLKDKGKVLEVLKNWPERSIQVIVVTDGERILGLGDLGCQGMGIPVGKLSLYTALGGVRPSACLPITIDVGTNNQTLLDDEYYIGLKQRRATGEEYHELLQEFMNAVKQNYGEKVLVQFEDFANHNAFDLLAKYSKSHLVFNDDIQGTASVVLAGLLAALKVIGGGLADQTYLFLGAGEAGTGIAELIALEMSKHTDLPLDDCRKKIWLVDSKGLLVESRKESLQHFKKPFAHEHEPLTTLLEAVQSLKPTVLIGTSGVGKTFTQEVVEAMASFNEKPVIFSLSNPTSHSECTAEEAYTWTKGTAVFASGSPFDPVEYEGKTYVPGQSNNAYVFPGFGLGVVISGAIRVHDDMLLAASEALAEQVSQENFDKGLIFPPFTNIRKISANIAAKVAAKAYDLGLASRLPRPDDLVKYAESCMYPPLYRSYR

SEQ ID NO: 235 - protein, 571 aa, Phleum pratense
EMAGGGVEDVYGEDRATEEQFVTPWSFSVASGHSLLRDPRHNKGLAFSEAERDAHYLRGLLPPAIVSQEHQEKKIMHNLRQYTVPLQRYIAMMDLQERNERLFYKLLIDNVEELLPVVYTPVVGEACQKYGSIYRRPQGLYISLKDKGKVLEVLKNWPERSIQVIVVTDGERILGLGDLGCQGMGIPVGKLSLYTALGGVRPSACLPITIDVGTNNQTLLDDEYYIGLKQRRATGEEYHELLQEFMNAVKQNYGEKVLVQFEDFANHNAFDLLAKYSKSHLVFNDDIQGTASVVLAGLLAALKVIGGGLADQTYLFLGAGEAGTGIAELIALEMSKHTDLPLDDCRKKIWLVDSKGLLVESRKESLQHFKKPFAHEHEPLTTLLEAVQSLKPTVLIGTSGVGKTFTQEVVEAMASFNEKPVIFSLSNPTSHSECTAEEAYTWTKGTAVFASGSPFDPVEYEGKTYVPGQSNNAYVFPGFGLGVVISGAIRVHDDMLLAASEALAEQVSQENFDKGLIFPPFTNIRKISANIAAKVAAKAYDLGLASRLPRPDDLVKYAESCMYPPLYRSYR

SEQ ID NO: 236 - protein, 571 aa, Phleum pratense
EMAGGGVEDVYGEDRATEEQFVTPWSFSVASGHSLLRDPRHNKGLAFSEAERDAHYLRGLLPPAIVSQEHQEKKIMHNLRQYTVPLQRYIAMMDLQERNERLFYKLLIDNVEELLPVVYTPVVGEACQKYGSIYRRPQGLYISLKDKGKVLEVLKNWPERSIQVIVVTDGERILGLGDLGCQGMGIPVGKLSLYTALGGVRPSACLPITIDVGTNNQTLLDDEYYIGLKQRRATGEEYHELLQEFMNAVKQNYGEKVLVQFEDFANHNAFDLLAKYSKSHLVFNDDIQGTASVVLAGLLAALKVIGGGLADQTYLFLGAGEAGTGIAELIALEMSKHTDLPLDDCRKKIWLVDSKGLLVESRKESLQHFKKPFAHEHEPLTTLLEAVQSLKPTVLIGTSGVGKTFTQEVVEAMASFNEKPVIFSLSNPTSHSECTAEEAYTWTKGTAVFASGSPFDPVEYEGKTYVPGQSNNAYVFPGFGLGVVISGAIRVHDDMLLAASEALAEQVSQENFDKGLIFPPFTNIRKISANIAAKVAAKAYDLGLASRLPRPDDLVKYAESCMYTPLYRSYR

SEQ ID NO: 237 - protein, 571 aa, Phleum pratense; identical to SEQ ID NO: 236

SEQ ID NO: 238 - protein, 299 aa, Phleum pratense
MAGGGVEDVYGEDRATEEQFVTPWSFSVASGHSLLRDPRHNKGLAFSEAERDAHYLRGLLPPAIVSQEHQEKKIMHNLRQYTVPLQRYIAMMDLQERNERLFYKLLIDNVEELLPVVYTPVVGEACQKYGSIYRRPQGLYISLKDKGKVLEVLKNWPERSIQVIVVTDGERILGLGDLGCQGMGIPVGKLSLYTALGGVRPSACLPITIDVGTNNQTLLDDEYYIGLKQRRATGEEYHELLQEFMNAVKQNYGEKVLVQFEDFANHNAFDLLAKYSKSHLVFNDDIQGTASVVLAGLLA

SEQ ID NO: 239 - protein, 529 aa, Phleum pratense
GGVEDVYGEDRATEEQFVTPWSFSVASGHSLLRDPRHNKGLAFSEAERDAHYLRGLLPPAIVSQEHQEKKIMHNLRQYTVPLQRYIAMMDLQERNERLFYKLLIDNVEELLPVVYTPVVGEACQKYGSIYRRPQGLYISLKDKGKVLEVLKNWPERSIQVIVVTDGERILGLGDLGCQGMGIPVGKLSLYTALGGVRPSACLPITIDVGTNNQTLLDDEYYIGLKQRRATGEEYHELLQEFMNAVKQNYGEKVLVQFEDFANHNAFDLLAKYSKSHLVFNDDIQGTASVVLAGLLAALKVIGGGLADQTYLFLGAGEAGTGIAELIALEMSKHTDLPLDDCRKKIWLVDSKGLLVESRKESLQHFKKPFAHEHEPLTTLLEAVQSLKPTVLIGTSGVGKTFTQEVVEAMASFNEKPVIFSLSNPTSHSECTAEEAYTWTKGTAVFASGSPFDPVEYEGKTYVPGQSNNAYVFPGFGLGVVISGAIRVHDDMLLAASEALAEQVSQENFDKGLIFPPFTNIRKISANIAA

SEQ ID NO: 240 - protein, 54 aa, Phleum pratense
ICASGQIIRKGFYLTKNVEHKGQVDLVTETDKACEDLIFNHLRKLYPDHKFIGE

SEQ ID NO: 241 - protein, 101 aa, Phleum pratense
IDFYSTITRARFEEMNMDLFRKCMEPVEKCLSDAKMDKSTVHDVVLVGGSTRIPKVQQLLQDFFNGKELCKSINPDEAVAYGAAVQAAILSGEGNEKVQDL

SEQ ID NO: 242 - protein, 150 aa, Phleum pratense
VQEFKRKNKKDISGNPRALRRLRTACERAKRTLSSTAQTTIEIDSLFEGIDFYSTITRARFEELNMDLFRKCMEPVEKCLRDAKMDKSTVHDVVLVGGSTRIPKVQQLLQDFFNGKELCKSINPDEAVAYGAAVQAAILSGEGNEKVQDL

SEQ ID NO: 243 - protein, 150 aa, Phleum pratense
VQEFKRKHKKDMTGNPRALRRLRTACERAKRTLSSTAQTTIEIDSLFEGIDFYSTITRARFEELNMDLFRKCMEPVEKCLRDAKMDKSTVHDVVLVGGSTRIPKVQQLLQDFFNGKELCKSINPDEAVAYGAAVQAAILSGEGNEKVQDL

SEQ ID NO: 244 - protein, 93 aa, Phleum pratense
IDFYSTITRARFEEMNMDLFRKCMEPVEKCLRDAKMDKSTVHDVVLVGGSTRIPKVQQLLQDFFNGKELCKSINPDEAVAYGAAVQAAILSGE

SEQ ID NO: 245 - protein, 75 aa, Phleum pratense
RARFEEMNMDLFRKCMEPVEKCLRDAKMDKSTVHDVVLVGGSTRIPKVQQLLQDFFNGKELCKSINPDEAVAYGA

SEQ ID NO: 246 - protein, 51 aa, Phleum pratense
VEKCLRDAKMDKSTVHDVVLVGGSTRIPKVQQLLQDFFNGKELCKSINPDE

SEQ ID NO: 247 - protein, 128 aa, Phleum pratense
ETAGGVMTTLIPRNTTIPTKKEQVFSTYSDNQPGVLIQVYEGERARTRDNNLLGKFELSGIPPAPRGVPQITVCFDIDANGILNVSAEDKTTGQKNKITITNDKGRLSKEDIEKMVQEAERYKAEDEE

SEQ ID NO: 248 - protein, 116 aa, Phleum pratense
RNTTIPTKKEQVFSTYSDNQPGVLIQVYEGERARTRDNNLLGKFELSGIPPAPRGVPQITVCFDIDANGILNVSAEDKTTGQKNKITITNDKGRLSKEDIEKMVQEAERYKAEDEE

SEQ ID NO: 249 - protein, 59 aa, Phleum pratense
AKMDKSTVHDVVLVGGSTRIPKVQQLLQDFFNGKELCKSINPDEAVAYGAAVQAAILSG

SEQ ID NO: 250 - protein, 71 aa, Phleum pratense
AAILRGEGNEKVQDLLLLDVTPLSLGLETAGGVMTTLIPRNTTIPTKKEQVFSTYSDNQPGVLIQVYEGER

SEQ ID NO: 251 - protein, 106 aa, Phleum pratense
CKSINPDEAVAYGAAVQAAILSGEGNEKVQDLLLLDVTPLSLGLETAGGVMTVLIPRNTTIPTKKEQVFSTYSDNQPGVLIQVYEGERARTRDNNLLGKFELSGIP

SEQ ID NO: 252 - protein, 98 aa, Phleum pratense
RPWRTAPPSRPPSSAARATRRCRTCFLLDVTPLSLGLETAGGVMTTLIPRNTTIPTKKEQVFSTYSDNQPGVLIQVYEGERARTRDNNLLGKFELSGI

SEQ ID NO: 253 - protein, 74 aa, Phleum pratense
KKEQVFSTYSDNQPGVLIQVYEGERTRTRDNNLLGKFELSGIPPAPRGVPQITVCFDIDANGILNVSAEDKTTG

SEQ ID NO: 254 - protein, 59 aa, Phleum pratense
RNTTIPTKKEQVFSTYSDNQPGVLIQVYEGERARTRDNNLLGKFELSGIPPAPRGVPQI

SEQ ID NO: 255 - protein, 61 aa, Phleum pratense
LFRKCMEPVEKCLRDAKMDKSTVHDVVLVGGSTRIPKVQQLLQDFFNGKELCKSINPDEAV

SEQ ID NO: 256 - protein, 67 aa, Phleum pratense
EELNMDLFRKCMEPVEKCLRDAKMDKSTVHDVVLVGGSTRIPKVQQLLQDFFNGKELCKSINPDEAV

SEQ ID NO: 257 - protein, 43 aa, Phleum pratense
KKEQVFSTYSDNQPGVLIQVYEGERARTKDNNLLGKFELSGIP

SEQ ID NO: 258 - protein, 88 aa, Phleum pratense
ELIKATDSWMEASEMLYPDYDSMIPDYDTVITNVRRSLAVAKKNHLAWNCERCRKGESKKKIDAISEGNDLGKIIAVLSAFVDPPVTK

SEQ ID NO: 259 - protein, 61 aa, Phleum pratense
YDTVITKVRRSLAVAKKNHLAWNCERCRKGESKKTVDAISEGNDLEKIIAILSAFVDAATK

SEQ ID NO: 260 - protein, 61 aa, Phleum pratense
YDTVITNVRRSLAVAKKNHLAWNCERCRKGESKKTVDAISEGNDLEKIVAILSAFVDAATK

SEQ ID NO: 261 - protein, 49 aa, Phleum pratense
YDTVITNVRRSLAVAKKNHLAWNCERCRKGESKKTVDAILSAFVDAATK

SEQ ID NO: 262 - protein, 52 aa, Phleum pratense
RSLAVAKKNHLAWNCERCRKGESKKTVDAISEGNDLEKIVAILSAFVDAATK

SEQ ID NO: 263 - protein, 71 aa, Phleum pratense
PDYDSMIPDYDTVITNVRRSLAVAKKNHLAWNCERCRKGESKKKIDAISEGNDLGKIIAVLSAFVDPPVTK

SEQ ID NO: 264 - protein, 74 aa, Phleum pratense
KGYNISLASMIPDYDTVITNVRRSLAVAKKNHLAWNCERCRKGESKKTVDAISEGNDLEKIVAILSAFVDAATK

SEQ ID NO: 265 - protein, 68 aa, Phleum pratense
YDSMIPDYDTVITNVRRSLAVAKKNHLAWNCERCRKGESKKTVDAISEGNDLEKIVAILSAFVDAATK

SEQ ID NO: 266 - protein, 73 aa, Phleum pratense
GYNISLASMIPDYDTVITNVRRSLAVAKKNHLAWNCERCRKGESKKTVDAISEGNDLEKIVAILSAFVDAATK

SEQ ID NO: 267 - protein, 129 aa, Phleum pratense
QEMAYWSLKAAIEIGNGAADAASSLYLFGENLPRGADTCYADCHTELIKATDSWMEASEMLYPDYDSMIPDYDTVITNVRRSLAVAKKNHLAWNCERCRKGESKKTVDAISEGNDLEKIVAILSAFVDA

SEQ ID NO: 268 - protein, 330 aa, Phleum pratense
EEEVEVAPPQAMEVRVKILFTALCHTDVYFWEAKGQTPVFPRIFGHEAGGIVESVGEGVTDVAPGDHVLPVFTGECKECRHCKSAESNMCDLLRINTDRGVMISDGKSRFSIDGKPIFHFVGTSTFSEYTVMHVGCVAKINPEAPLDKVCVLSCGISTGLGASINVAKPPKGSTVAIFGLGAVGLAAAEGARIAGASRIIGIDLNANRFEEARKFGCTEFVNPKDHTKPVQEVLAEMTDGGVDRSVECTGNINAMIQAFECVHDGWGVAVLVGVPHKDAEFKTHPMNFLNERTLKGTFFGNFKPRTDLPNVVEMYMKKELEVEKFITHSV

SEQ ID NO: 269 - protein, 313 aa, Phleum pratense
NWFCSWVTAAAVAWEAGKPLSIEEVEVAPPQAMEVRVKILFTALCHTDVYFWEAKGQTPVFPRIFGHEAGGIVESVGEGVTDVAPGDHVLPVFTGECKECRHCKSAESNMCDLLRINTDRGVMISDGKSRFSIDGKPIFHFVGTSTFSEYTVMHVGCVAKINPEAPLDKVCVLSCGISTGLGASINVAKPPKGSTVAIFGLGAVGLAAAEGARIAGASRIIGIDLNANRFEEARKFGCTEFVNPKDHTKPVQEVLAEMTDGGVDRSVECTGNINAMIQAFECVHDGWGVAVLVGVPHKDAEFKTHPMNFLNER

SEQ ID NO: 270 - protein, 344 aa, Phleum pratense
CKAAVAWEAGKPLSIEEVEVAPPQAMEVRVKILFTALCHTDVYFWEAKGQTPVFPRIFGHEAGGIVESVGEGVTDVAPGDHVLPVFTGECKECRHCKSAESNMCDLLRINTDRGVMISDGKSRFSIDGKPIFHFVGTSTFSEYTVMHVGCVAKINPEAPLDKVCVLSCGISTGLGASINVAKPPKGSTVAIFGLGAVGLAAAEGARIAGASRIIGIDLNANRFEEARKFGCTEFVNPKDHTKPVQEVLAEMTDGGVDRSVECTGNINAMIQAFECVHDGWGVAVLVGVPHKDAEFKTHPMNFLNERTLKGTFFGNFKPRTDLPNVVEMYMKKELEVEKFITHSV

SEQ ID NO: 271 - protein, 310 aa, Phleum pratense
EAGGIVESVGEGVTDVAPGDHVLPVFTGECKECRHCKSAESNMCDLLRINTDRGVMISDGKSRFSIDGKPIFHFVGTSTFSEYTVMHVGCVAKINPEAPLDKVCVLSCGISTGLGASINVAKPPKGSTVAIFGLGAVGLAAAEGARIAGASRIIGIDLNANRFEEARKFGCTEFVNPKDHTKPVQEVLAEMTDGGVDRSVECTGNINAMIQAFECVHDGWGVAVLVGVPHKDAEFKTHPMNFLNERTLKGTFFGNFKPRTDLPNVVEMYMKKELEVEKFITHSVTFSEINKAFDLMAKGEGIRCIIRMEH

SEQ ID NO: 272 - protein, 315 aa, Phleum pratense
RIFGHEAGGIVESVGEGVTDVAPGDHVLPVFTGECKECRHCKSAESNMCDLLRINTDRGVMISDGKSRFSIDGKPIFHFVGTSTFSEYTVMHVGCVAKINPEAPLDKVCVLSCGISTGLGASINVAKPPKGSTVAIFGLGAVGLAAAEGARIAGASRIIGIDLNANRFEEARKFGCTEFVNPKDHTKPVQEVLAEMTDGGVDRSVECTGNINAMIQAFECVHDGWGVAVLVGVPHKDAEFKTHPMNFLNERTLKGTFFGNFKPRTDLPNVVEMYMKKELEVEKFITHSVTFSEINKAFDLMAKGEGIRCIIRMEH

SEQ ID NO: 273 - protein, 379 aa, Phleum pratense
SFSWICACVRAAAVAWEAGKPLSIEEVEVAPPQAMEVRVKILFTALCHTDVYFWEAKGQTPVFPRIFGHEAGGIVESVGEGVTDVAPGDHVLPVFTGECKECRHCKSAESNMCDLLRINTDRGVMISDGKSRFSIDGKPIFHFVGTSTFSEYTVMHVGCVAKINPEAPLDKVCVLSCGISTGLGASINVAKPPKGSTVAIFGLGAVGLAAAEGARIAGASRIIGIDLNANRFEEARKFGCTEFVNPKDHTKPVQEVLAEMTDGGVDRSVECTGNINAMIQAFECVHDGWGVAVLVGVPHKDAEFKTHPMNFLNERTLKGTFFGNFKPRTDLPNVVEMYMKKELEVEKFITHSVTFSEINKAFDLMAKGEGIRCIIRMEH

SEQ ID NO: 274 - protein, 317 aa, Phleum pratense
LMSFSWICACVRAAAVAWEAGKPLSIEEVEVAPPQAMEVRVKILFTALCHTDVYFWEAKGQTPVFPRIFGHEAGGIVESVGEGVTDVAPGDHVLPVFTGECKECRHCKSAESNMCDLLRINTDRGVMISDGKSRFSIDGKPIFHFVGTSTFSEYTVMHVGCVAKINPEAPLDKVCVLSCGISTGLGASINVAKPPKGSTVAIFGLGAVGLAAAEGARIAGASRIIGIDLNANRFEEARKFGCTEFVNPKDHTKPVQEVLAEMTDGGVDRSVECTGNINAMIQAFECVHDGWGVAVLVGVPHKDAEFKTHPMNFLNER

SEQ ID NO: 275 - protein, 366 aa, Phleum pratense
VAWEAGKPLSIEEVEVAPPQAMEVRVKILFTALCHTDVYFWEAKGQTPVFPRIFGHEAGGIVESVGEGVTDVAPGDHVLPVFTGECKECRHCKSAESNMCDLLRINTDRGVMISDGKSRFSIDGKPIFHFVGTSTFSEYTVMHVGCVAKINPEAPLDKVCVLSCGISTGLGASINVAKPPKGSTVAIFGLGAVGLAAAEGARIAGASRIIGIDLNANRFEEARKFGCTEFVNPKDHTKPVQEVLAEMTDGGVDRSVECTGNINAMIQAFECVHDGWGVAVLVGVPHKDAEFKTHPMNFLNERTLKGTFFGNFKPRTDLPNVVEMYMKKELEVEKFITHSVTFSEINKAFDLMAKGEGIRCIIRMEH

SEQ ID NO: 276 - protein, 261 aa, Phleum pratense
VFTGECKECRHCKSAESNMCDLLRINTDRGVMISDGKSRFSIDGKPIFHFVGTSTFSEYTVMHVGCVAKINPEAPLDKVCVLSCGISTGLGASINVAKPPKGSTVAIFGLGAVGLAAAEGARIAGASRIIGIDLNANRFEEARKFGCTEFVNPKDHTKPVQEVLAEMTDGGVDRSVECTGNINAMIQAFECVHDGWGVAVLVGVPHKDAEFKTHPMNFLNERTLKGTFFGNFKPRTDLPNVVEMYMKKELEVEKFITHSVT

SEQ ID NO: 277 - protein, 311 aa, Phleum pratense
HEAGGIVESVGEGVTDVAPGDHVLPVFTGECKECRHCKSAESNMCDLLRINTDRGVMISDGKSRFSIDGKPIFHFVGTSTFSEYTVMHVGCVAKINPEAPLDKVCVLSCGISTGLGASINVAKPPKGSTVAIFGLGAVGLAAAEGARIAGASRIIGIDLNANRFEEARKFGCTEFVNPKDHTKPVQEVLAEMTDGGVDRSVECTGNINAMIQAFECVHDGWGVAVLVGVPHKDAEFKTHPMNFLNERTLKGTFFGNFKPRTDLPNVVEMYMKKELEVEKFITHSVTFSEINKAFDLMAKGEGIRCIIRMEH

SEQ ID NO: 278 - protein, 73 aa, Phleum pratense
ALRWNLQMGHSVLPKSVSEERIKQNLDVYDWSIPDDLLAKFSEIKQTRLLMGNFIVNKDSVYKTHEELWDGEI

SEQ ID NO: 279 - protein, 43 aa, Phleum pratense
QDFKKVNEIYAKYFPSPAPARSTYQVAALPLDARIEIECIAAL

SEQ ID NO: 280 - protein, 43 aa, Phleum pratense; identical to SEQ ID NO: 279

SEQ ID NO: 281 - protein, 19 aa, Phleum pratense
MAEDEEAASTLPGLSSSTL

SEQ ID NO: 282 - protein, 355 aa, Phleum pratense
VRVAVDVATMPALSETARSRGKDAGVSEKTSGAVEEMGFLGAGADADGFPWSNAMLQWQRTGFHFQPEKNWMNDPNGPVFYRGWYHLFYQYNPEGAVWGNIAWGHAVSRDLIHWRHLPLAMVPDQWYDINGVWTGSATVFPDGSLNMLYTGSTNASVQVQCLAVPEDPNDSLLRNWTKHPANPVLLPPPGIGLKDFRDPTTAWFDDSDSTWRTVIGSKDDNGHAGIAMVYKTKDFVSYELIPGLLHRVDGTGMWECIDFYPVGGNSGEELYVIKESSDDDRHDYYALGSYDAAANKWTPQDPEADLGIGLRYDWGKFYASKTFYDPAKKRRVLWGWIAETDSERADVTKGWASLM

SEQ ID NO: 283 - protein, 191 aa, Phleum pratense
AGIAMVYKTKDFVSYELIPGLLHRVDGTGMWECIDFYPVGGNSGEELYVIKESSDDDRHDYYALGSYDAAANKWTPQDPEADLGIGLRYDWGKFYASKTFYDPAKKRRVLWGWIAETDSERADVTKGWASLMSIPRTVDLDEKTRTNLIQWPVEEIETLRINSTDLGGVTIDHGSVFPLPLRHATQLDIEA

SEQ ID NO: 284 - protein, 398 aa, Phleum pratense
GSRGKDAGVSEKTSGAVEEMGFLGAGADADGFPWSNAMLQWQRTGFHFQPEKNWMNDPNGPVFYRGWYHLFYQYNPEGAVWGNIAWGHAVSRDLIHWRHLPLAMVPDQWYDINGVWTGSATVFPDGSLNMLYTGSTNASVQVQCLAVPEDPNDSLLRNWTKHPANPVLLPPPGIGLKDFRDPTTAWFDDSDSTWRTVIGSKDDNGHAGIAMVYKTKDFVSYELIPGLLHRVDGTGMWECIDFYPVGGNSGEELYVIKESSDDDRHDYYALGSYDAAANKWTPQDPEADLGIGLRYDWGKFYASKTFYDPAKKRRVLWGWIAETDSERADVTKGWASLMSIPRTVDLDEKTRTNLIQWPVEEIETLRINSTDLGGVTIDHGSVFPLPLRHATQLDIEAA

SEQ ID NO: 285 - protein, 220 aa, Phleum pratense
KDFRDPTTAWFDDSDQTWRTVIGSKDDNGHAGIAMVYKTKDFVSYELIPGLLHRVDGTGMWECIDFYPVGGNSGEELYVIKESSDDDRHDYYALGSYDAAANKWTPQDPEADLGIGLRYDWGKFYASKTFYDPAKKRRVLWGWIAETDSERADVTKGWASLMSIPRTVDLDEKTRTNLIQWPVEEIETLRINSTDLGGVTIDHGSVFPLPLRHATQLDIE

SEQ ID NO: 286 - protein, 214 aa, Phleum pratense
LKDFRDPTTAWFDDSDQTWRTVIGSKDDNGHAGIAMVYKTKDFVSYELIPGLLHRVDGTGMWECIDFYPVGGDSGEELYVIKESSDDDRHDYYALGSYDAAANKWTPQDPEADLGIGLRYDWGKFYASKTFYDPAKKRRVLWGWIAETDSERADVTKGWASLMSIPRTVDLDEKTRTNLIQWPVEEIETLRINSTDLGGVTIDHGSVFPLPLRH

SEQ ID NO: 287 - protein, 392 aa, Phleum pratense
GLKDFRDPTTAWFDDSDQTWRTVIGSKDDNGHAGIAMVYKTKDFVSYELIPGLLHRVDGTGMWECIDFYPVGGNSGEELYVIKESSDDDRHDYYALGSYDAAANKWTPQDPEADLGIGLRYDWGKFYASKTFYDPAKKRRVLWGWIAETDSERADVTKGWASLMSIPRTVDLDEKTRTNLIQWPVEEIETLRINSTDLGGVTIDHGSVFPLPLRHATQLDIEAAFRLDHAAVAALNEADVSYNCSTSGGSANRGALGPFGLLVLADGKEEQTAVYFYVSRGLDGALRTHFCHDESRSSRAKDVVKRVVGYTVPVLDGEAFSVRVLVDHSIVESFAMGGRSTATSRVYPTEAIYAAAGVYLFNNATSGTVTVEKLVVHEMDSSYNQIFMAEDL

SEQ ID NO: 288 - protein, 525 aa, Phleum pratense
QRTGFHFQPEKNWMNDPNGPVFYRGWYHLFYQYNPEGAVWGNIAWGHAVSRDLIHWRHLPLAMVPDQWYDINGVWTGSATVFPDGSLNMLYTGSTNASVQVQCLAVPEDPNDSLLRNWTKHPANPVLLPPPGIGLKDFRDPTTAWFDDSDQTWRTVIGSKDDNGHAGIAMVYKTKDFVSYELIPGLLHRVDGTGMWECIDFYPVGGNSGEELYVIKESSDDDRHDYYALGSYDAAANKWTPQDPEADLGIGLRYDWGKFYASKTFYDPAKKRRVLWGWIAETDSERADVTKGWASLMSIPRTVDLDEKTRTNLIQWPVEEIETLRINSTDLGGVTIDHGSVFPLPLRHATQLDIEAAFRLDHAAVAALNEADVSYNCSTSGGSANRGALGPFGLLVLADGKEEQTAVYFYVSRGLDGALRTHFCHDESRSSRAKDVVKRVVGYTVPVLDGEAFSVRVLVDHSIVESFAMGGRSTATSRVYPTEAIYAAAGVYLFNNATSGTVTVEKLVVHEMDSSYNQIFMAEDL

SEQ ID NO: 289 - protein, 375 aa, Phleum pratense
GGVRWRACAAVLAASAVVVLVVASGLAGSRVVRVAVDVATMPALSETARSRGKDAGVSEKTSGAVEEMGFLGAGADADGFPWSNAMLQWQRTGFHFQPEKNWMNDPNGPVFYRGWYHLFYQYNPEGAVWGNIAWGHAVSRDLIHWRHLPLAMVPDQWYDINGVWTGSATVFPDGSLNMLYTGSTNASVQVQCLAIPEDPNDSLLRNWTKHPANPVLLPPPGIGLKDFRDPTTAWFDDSDQTWRTVIGSKDDNGHAGIAMVYKTKDFVSYELIPGLLHRVDGTGMWECIDFYPVGGDSGEELYVIKESSDDDRHDYYALGSYDAAANKWTPQDPEADLGIGLRYDWGKFYASKTFYDPAKKRRVLWGWIAETDSER

SEQ ID NO: 290 - protein, 315 aa, Phleum pratense
GAVEEMGFLGAGADADGFPWSNAMLQWQRTGFHFQPEKNWMNDPNGPVFYRGWYHLFYQYNPEGAVWGNIAWGHAVSRDLIHWRHLPLAMVPDQWYDINGVWTGSATVFPDGSLNMLYTGSTNASVQVQCLAIPEDPNDSLLRNWTKHPANPVLLPPPGIGLKDFRDPTTAWFDDSDQTWRTVIGSKDDNGHAGIAMVYKTKDFVSYELIPGLLHRVDGTGMWECIDFYPVGGDSGEELYVIKESSDDDRHDYYALGSYDAAANKWTPQDPEADLGIGLRYDWGKFYASKTFYDPAKKRRVLWGWIAETDSERAD

SEQ ID NO: 291 - protein, 164 aa, Phleum pratense
GLKDFRDPTTAWFDDSDSTWRTVIGSKDDNGHAGIAMVYKTKDFVSYELIPGLLHRVDGTGMWECIDFYPVGGNSGEELYVIKESSDDDRHDYYALGSYDAAANKWTPQDPEADLGIGLRYDWGKFYASKTFYDPAKKRRVLWGWIAETDSERADVTKGWASLM

SEQ ID NO: 292 - protein, 346 aa, Phleum pratense
MPALSETARSRGKDAGVSEKTSGAVEEMGFLGAGADADGFPWSNAMLQWQRTGFHFQPEKNWMNDPNGPVFYRGWYHLFYQYNPEGAVWGNIAWGHAVSRDLIHWRHLPLAMVPDQWYDINGVWTGSATVFPDGSLNMLYTGSTNASVQVQCLAVPEDPNDSLLRNWTKHPANPVLLPPPGIGLKDFRDPTTAWFDDSDSTWRTVIGSKDDNGHAGIAMVYKTKDFVSYELIPGLLHRVDGTGMWECIDFYPVGGDSGEELYVIKESSDDDRHDYYALGSYDAAANKWTPQDPEADLGIGLRYDWGKFYASKTFYDPAKKRRVLWGWIAETDSERADVTKGWASLM

SEQ ID NO: 293 - protein, 290 aa, Phleum pratense
MLQWQRTGFHFQPEKNWMNDPNGPVFYRGWYHLFYQYNPEGAVWGNIAWGHAVSRDLIHWRHLPLAMVPDQWYDINGVWTGSATVFPDGSLNMLYTGSTNASVQVQCLAVPEDPNDSLLRNWTKHPANPVLLPPPGIGLKDFRDPTTAWFDDSDQTWRTVIGSKDDNGHAGIAMVYKTKDFVSYELIPGLLHRVDGTGMWECIDFYPVGGDSGEELYVIKESSDDDRHDYYALGSYDAAANKWTPQDPEADLGIGLRYDWGKFYASKTFYDPAKKRRVLWGWIAETDSER

SEQ ID NO: 294 - protein, 301 aa, Phleum pratense
MLQWQRTGFHFQPEKNWMNDPNGPVFYRGWYHLFYQYNPEGAVWGNIAWGHAVSRDLIHWRHLPLAMVPDQWYDINGVWTGSATVFPDGSLNMLYTGSTNASVQVQCLAVPEDPNDSLLRNWTKHPANPVLLPPPGIGLKDFRDPTTAWFDDSDQTWRTVIGSKDDNGHAGIAMVYKTKDFVSYELIPGLLHRVDGTGMWECIDFYPVGGNSGEELYVIKESSDDDRHDYYALGSYDAAANKWTPQDPEADLGIGLRYDWGKFYASKTFYDPAKKRRVLWGWIAETDSERADVTKGWASLM

SEQ ID NO: 295 - protein, 431 aa, Phleum pratense
SESTKIFLESSTMESRAIAGTPPLPYAYEPLPHSSDDAAHDDRRSGGVRWRACAAVLAASAVVVLVVASGLAGSRADRVAVDVATMPALSETARSRGKDAGVSEKTSGAVEEMGFLGAGADADGFPWSNAMLQWQRTGFHFQPEKNWMNDPNGPVFYRGWYHLFYQYNPEGAVWGNIAWGHAVSRDLIHWRHLPLAMVPDQWYDINGVWTGSATVFPDGSLNMLYTGSTNASVQVQCLAVPEDPNDSLLRNWTKHPANPVLLPPPGIGLKDFRDPTTAWFDDSDQTWRTVIGSKDDNGHAGIAMVYKTKDFVSYELIPGLLHRVDGTGMWECIDFYPVGGDSGEELYVIKESSDDDRHDYYALGSYDAAANKWTPQDPEADLGIGLRYDWGKFYASKTFYDPAKKRRVLWGWIAETDSERADVTKGWASLM

SEQ ID NO: 296 - protein, 218 aa, Phleum pratense
TVFPDGSLNMLYTGSTNASVQVQCLAVPEDPNDSLLRNWTKHPANPVLLPPPGIGLKDFRDPTTAWFDDSDQTWRTVIGSKDDNGHAGIAMVYKTKDFVSYELIPGLLHRVDGTGMWECIDFYPVGGDSGEELYVIKESSDDDRHDYYALGSYDAAANKWTPQDPEADLGIGLRYDWGKFYASKTFYDPAKKRRVLWGWIAETDSERADVTKGWASLM

SEQ ID NO: 297 - protein, 133 aa, Phleum pratense
FVGDKVAYALAQGLKVIACVGETLEQREAGSTMTVVAEQTKAIADKITDWTNVVIAYEPVWAIGTGKVATPAQAQEVHANLRDWLKTNVSPEVAETTRIIYGGSVTGASANELAAQPDVDGFLVGGASLKPEF

SEQ ID NO: 298 - protein, 116 aa, Phleum pratense
YALAQGLKVIACVGETLEQREAGSTMTVVAEQTKAIADKITDWTNVVIAYEPVWAIGTGKVATPAQAQEVHANLRDWLKTNVSPEVAETTRIIYGGSVTGASANELAAQPDVDGFL

SEQ ID NO: 299 - protein, 143 aa, Phleum pratense
GDKVAYALAQGLKVIACVGETLEQREAGSTMTVVAEQTKAIADKITDWTNVVIAYEPVWAIGTGKVATPAQAQEVHANLRDWLKTNVSPEVAETTRIIYGGSVTGASANELAAQPDVDGFLVGGASLKPEFIDIINAATVKSA

SEQ ID NO: 300 - protein, 195 aa, Phleum pratense
PLAVAVAMGRKFFVGGNWKCNGTTDQVDKIVKILNDGKIASTDIVEVVVSPPYVFLPTVKDKLRPEIQVAAQNCWVKKGGAFTGEVSAEMLANLGIPWVILGHSERRALLGESSEFVGDKVAYALAQGLKVIACVGETLEQREAGSTMTVVAEQTKAIADKITDWTNVVIAYEPVWAIGTGKVATPAQAQEVHAN

SEQ ID NO: 301 - protein, 161 aa, Phleum pratense
DGKIASTDIVEVVVSPPYVFLPTVKDKLRPEIQVAAQNCWVKKGGAFTGEVSAEMLANLGIPWVILGHSERRALLGESSEFVGDKVAYALAQGLKVIACVGETLEQREAGSTMTVVAEQTKAIADKITDWTNVVIAYEPVWAIGTGKVATPAQAQEVHANL

SEQ ID NO: 302 - protein, 240 aa, Phleum pratense
LAVAVAMGRKFFVGGNWKCNGTTDQVDKIVKILNDGKIASTDIVEVVVSPPYVFLPTVKDKLRPEIQVAAQNCWVKKGGAFTGEVSAEMLANLGIPWVILGHSERRALLGESSEFVGDKVAYALAQGLKVIACVGETLEQREAGSTMTVVAEQTKAIADKITDWTNVVIAYEPVWAIGTGKVATPAQAQEVHANLRDWLKTNVSPEVAETTRIIYGGSVTGASANELAAQPDVDGFLVGG

SEQ ID NO: 303 - protein, 159 aa, Phleum pratense
MLANLGVPWDILGHSERRALLGESSEFVGDKVAYALAQGLKVIACVGETLEQREAGSTMTVVAEQTKAIADKITDWTNVVIAYEPVWAIGTGKVATPAQAQEVHANLRDWLKTNVSPEVAETTRIIYGGSVTGASANELAAQPDVDGFLVGGASLKPEF

SEQ ID NO: 304 - protein, 178 aa, Phleum pratense
LSAEWNHRPVDKIVKILNDGKIASTDIVEVVVSPPYVFLPTVKDKLRPEIQVAAQNCWVKKGGAFTGEVSAEMLANLGVPWDILGHSERRALLGESSEFVGDKVAYALAQGLKVIACVGETLEQREAGSTMTVVAEQTKAIADKITDWTNVVIAYEPVWAIGTGKVATPAQAQEVHAN

SEQ ID NO: 305 - protein, 214 aa, Phleum pratense
LQKKKKKKFLPTVKDKLRPEIQVAAQNCWVKKGGAFTGEVSAEMLANLGVPWDILGHSERRALLGESSEFVGDKVAYALAQGLKVIACVGETLEQREAGSTMTVVAEQTKAIADKITDWTNVVIAYEPVWAIGTGKVATPAQAQEVHANLRDWLKTNVSPEVAETTRIIYGGSVTGASANELAAQPDVDGFLVGGASLKPEFIDIINAATVKSA

SEQ ID NO: 306 - protein, 133 aa, Phleum pratense
GLKVIACVGETLEQREAGSTMTVVAEQTKAIADKITDWTNVVIAYEPVWAIGTGKVATPAQAQEVHANLRDWLKTNVSPEVAETTRIIYGGSVTGASANELAAQPDVDGFLVGGASLKPEFIDIINAATVKSA

SEQ ID NO: 307 - protein, 64 aa, Phleum pratense
GVWQHDRVEIIANDQGNRTTPSYVAFTDSERLIGDAAKNQVAMNPINTVFGEHLSTCTPYTTRS

SEQ ID NO: 308 - protein, 18 aa, Phleum pratense
SSTRGWCSRRRAGRGTSS

SEQ ID NO: 309 - protein, 107 aa, Phleum pratense
IPGPAEKPMIVVKYKGEEKQFAAEEISSMVLIKMREIAEAFLGNSIKNAVVTVPAYFNDSQRQATKDAGVIAGLNVLRIINEPTAAAIAYGLDKKSTSTGEKNVLIF

SEQ ID NO: 310 - protein, 235 aa, Phleum pratense
LDFVWYEPLTYNTEDEFAAHRAREFTLGWFMHPITYGHYPETMQRLVADRLPNFTDEQTRLLQGSADIVGVNHYTTYYAKNHENLTHMSYANDWQVQLVYERNGIPIGKQGYSKWLYVVPWGFYKAVMHVKDKYRNPLMIIGENGIDQSGSDTLPHALYDKFRIDYFDQYLHELKRATDDGARVTGYFAWSLLDNFEWRMGFTSKFGIVYVDRKTFTRYPKDSTRWFRKVIKNEE

SEQ ID NO: 311 - protein, 235 aa, Phleum pratense; identical to SEQ ID NO: 310

SEQ ID NO: 312 - protein, 80 aa, Phleum pratense
HALYDKFRIDYFDQYLHELKRATDDGARVTGYFAWSLLDNFEWRMGFTSKFGIVYVDRKTFTRYPKDSTRWFRKVIKNEE

SEQ ID NO: 313 - protein, 168 aa, Phleum pratense
IVGVNHYTTYYAKNHENLTHMSYANDWQVQLVYERNGIPIGKQGYSKWLYVVPWGFYKAVMHVKDKYRNPLMIIGENGIDQSGSDTLPHALYDKFRIDYFDQYLHELKRATDDGARVTGYFAWSLLDNFEWRMGFTSKFGIVYVDRKTFTRYPKDSTRWFRKVIKNEE

SEQ ID NO: 314 - protein, 206 aa, Phleum pratense
FMHPITYGHYPETMQRLVADRLPNFTDEQTRLLQGSADIVGVNHYTTYYAKNHENLTHMSYANDWQVQLVYERNGIPIGKQGYSKWLYVVPWGFYKAVMHVKDKYRNPLMIIGENGIDQSGSDTLPHALYDKFRIDYFDQYLHELKRATDDGARVTGYFAWSLLDNFEWRMGFTSKFGIVYVDRKTFTRYPKDSTRWFRKVIKNEE

SEQ ID NO: 315 - protein, 238 aa, Phleum pratense
GILLDFVWYEPLTYNTEDEFAAHRAREFTLGWFMHPITYGHYPETMQRLVADRLPNFTDEQTRLLQGSADIVGVNHYTTYYAKNHENLTHMSYANDWQVQLVYERNGIPIGKQGYSKWLYVVPWGFYKAVMHVKDKYRNPLMIIGENGIDQSGSDTLPHALYDKFRIDYFDQYLHELKRATDDGARVTGYFAWSLLDNFEWRMGFTSKFGIVYVDRKTFTRYPKDSTRWFRKVIKNEE

SEQ ID NO: 316 - protein, 137 aa, Phleum pratense
VYERNGIPIGKQGYSKWLYVVPWGFYKAVMHVKDKYRNPLMIIGENGIDQSGSDTLPHALYDKFRIDYFDQYLHELKRATDDGARVTGYFAWSLLDNFEWRMGFTSKFGIVYVDRKTFTRYPKDSTRWFRKVIKNEE

SEQ ID NO: 317 - protein, 137 aa, Phleum pratense; identical to SEQ ID NO: 316

SEQ ID NO: 318 - protein, 133 aa, Phleum pratense
VYERNGIPIGKQGYSKWLYVVPWGFYKAVMHVKDKYRNPLMIIGENGIDQSGSDTLPHALYDKFRIDYFDQYLHELKRATDDGARVTGYFAWSLLDNFEWRMGFTSKFGIVYVDRKTFTRYPKDSTRWFRKVI

SEQ ID NO: 319 - protein, 137 aa, Phleum pratense; identical to SEQ ID NO: 316

SEQ ID NO: 320 - protein, 81 aa, Phleum pratense
PHALYDKFRIDYFDQYLHELKRATDDGARVTGYFAWSLLDNFEWRMGFTSKFGIVYVDRKTFTRYPKDSTRWFRKVIKNEE

SEQ ID NO: 321 - protein, 63 aa, Phleum pratense
PHALYDKFRIDYFDQYLHELKRATDDGARVTGYFAWSLLDNFEWRMGFTSKFGIVYVDRKTFT

SEQ ID NO: 322 - protein, 80 aa, Phleum pratense; identical to SEQ ID NO: 312

SEQ ID NO: 323 - protein, 187 aa, Phleum pratense
DRLPNFTDEQTRLLQGSADIVGVNHYTTYYAKNHENLTHMSYANDWQVQLVYERNGIPIGKQGYSKWLYVVPWGFYKAVMHVKDKYRNPLMIIGENGIDQSGSDTLPHALYDKFRIDYFDQYLHELKRATDDGARVTGYFAWSLLDNFEWRMGFTSKFGIVYVDRKTFTRYPKDSTRWFRKVIKNEE

SEQ ID NO: 324 - protein, 187 aa, Phleum pratense; identical to SEQ ID NO: 323

SEQ ID NO: 325 - protein, 155 aa, Phleum pratense
GYDDIPKEVTDPDAKKPEDWDDEEDGEWTAPTIPNPEYKGPWKQKKIKNPNYQGKWNAPMTANPDFKDDPYIYAFDSLKYIGIELWQVKSGTLFDNILITDDAALAKTFAEETWAKHKDAEKAAFDEAEKKKEEEDASKAGEDDDDLDDEDADDE

SEQ ID NO: 326 - protein, 177 aa, Phleum pratense
GYDDIPKEVTDPDAKKPEDWDDEEDGEWTAPTIPNPEYKGPWKQKKIKNPNYQGKWKAPMIANPDFKDDPYIYAFDSLKYIGIELWQVKSGTLFDNILITDDAALAKTFAEETWAKHKDAEKAAFDEAEKKKEEEDASKAGEDDDDLDDEDADDEDKDDKAESDAEDHSDDEKHDEL

SEQ ID NO: 327 - protein, 177 aa, Phleum pratense; identical to SEQ ID NO: 326

SEQ ID NO: 328 - protein, 177 aa, Phleum pratense; identical to SEQ ID NO: 326

SEQ ID NO: 329 - protein, 132 aa, Phleum pratense
KIKNPNYQGKWKAPMIANPDFKDDPYIYAFDSLKYIGIELWQVKSGTLFDNILITDDAALAKTFAEETWAKHKDAEKAAFDEAEKKKEEEDASKAGEDDDDLDDEDADDEDKDDKAESDAEDHSDDEKHDEL

SEQ ID NO: 330 - protein, 171 aa, Phleum pratense
KEVTDPDAKKPEDWDDEEDGEWTAPTIPNPEYKGPWKQKKIKNPNYQGKWKAPMIANPDFKDDPYIYAFDSLKYIGIELWQVKSGTLFDNILITDDAALAKTFAEETWAKHKDAEKAAFDEAEKKKEEEDASKAGEDDDDLDDEDADDEDKDDKAESDAEDHSDDEKHDEL

SEQ ID NO: 331 - protein, 96 aa, Phleum pratense
MIANPDFKDDPYIYAFDSLKYIGIELWQVKSGTLFDNILITDDAALAKTFAEETWAKHKDAEKAAFDEAEKKKEEEDASKAGEDDDDLDDEDADDE

SEQ ID NO: 332 - protein, 96 aa, Phleum pratense; identical to SEQ ID NO: 331

SEQ ID NO: 333 - protein, 118 aa, Phleum pratense
MIANPDFKDDPYIYAFDSLKYIGIELWQVKSGTLFDNILITDDAALAKTFAEETWAKHKDAEKAAFDEAEKKKEEEDASKAGEDDDDLDDEDADDEDKDDKAESDAEDHSDDEKHDEL

SEQ ID NO: 334 - protein, 118 aa, Phleum pratense; identical to SEQ ID NO: 333

SEQ ID NO: 335 - protein, 19 aa, Phleum pratense
MARMKRPPRCCQDLVVLPL

SEQ ID NO: 336 - protein, 7 aa, Phleum pratense
MNNMSSR

SEQ ID NO: 337 - protein, 7 aa, Phleum pratense
MNNMSSR

SEQ ID NO: 338 - protein, 19 aa, Phleum pratense
MARMKRPPRCCQDLVVLPL

SEQ ID NO: 339 - protein, 19 aa, Phleum pratense
MARMKRPPRCCQDLVVLPL

SEQ ID NO: 340 - protein, 80 aa, Phleum pratense
QARGLLRRARGGPHHRRQRGAHRRVPLRPLRHRVRVHGQEGRRAKLRSAGEVEIQFRRVKCKYPEGTKVTFHVEKGSNPN

SEQ ID NO: 341 - protein, 81 aa, Phleum pratense
QARGLLRRARGGPHHRRQRGAHRRVPLRPLRHRVRVHGQEGRRAKLRSAGEVEIQFRRVKCKYPEGTKVTFHVVGVGPLLH

SEQ ID NO: 342 - protein, 86 aa, Phleum pratense
QARGLLRRARGGPHHRRQRGAHRRVPLRPLRHRVRVHGQEGRRAKLRSAGEVEIQFRRVKCKYPEGTKVTFHVEKGSNPNSTWGCW

SEQ ID NO: 343 - protein, 266 aa, Phleum pratense
TDAAAPAPAAAAASKWNLLTFDTEEDVAVSLAKYTAELSGKFAAERGAFTVVLSGGTLIETLRKLAEPPYLETVQWSKWHVFWVDERVVPKDHVDSNYKLAVDGLLSKVPIPTDQVYAINDTLSAEGAAADYETVLKQLVKSGVLAMSTATGFPRFDLMLLGMGPDGHLASLFPGHPLLNENQKWVTHIMDSPKPPPQRITFTFPVIKSSAYVAMVVTGPGEASAVKKVLSDDKTLPLLPTEMAILQDGEFTWFTDKPAVSMLQNK

SEQ ID NO: 344 - protein, 267 aa, Phleum pratense
ATDAAAPAPAAAAASKWNLLTFDTEEDVAVSLAKYTAELSGKFAAERGAFTVVLSGGTLIDTLRKLAEPPYLETVQWSKWHVFWVDERVVPKDHVDSNYKLAVDGLLSKVPIPTDQVYAINDTLSAEGAAADYETVLKQLVKSGVLAMSTATGFPRFDLMLLGMGPDGHLASLFPGHPLLNENQKWVTHIMDSPKPPPQRITFTFPVIKSSAYVAMVVTGPGEASAVKKVLSDDKTLPLLPTEMAILQDGEFTWFTDKPAVSMLQNK

SEQ ID NO: 345 - protein, 212 aa, Phleum pratense
GGTLIETLRKLAEPPYLETVQWSKWHVFWVDERVVPKDHVDSNYKLAVDGLLSKVPIPTDQVYAINDTLSAEGAAADYETVLKQLVKNGVLAMSTATGFPRFDLMLLGMGPDGHLASLFPGHPLLNENQKWVTHIMDSPKPPPQRITFTFPVIKSSAYVAMVVTGPGEASAVKKVLSDDKTLPLLPTEMAILQDGEFTWFTDKQAVSMLQNK

SEQ ID NO: 346 - protein, 256 aa, Phleum pratense
AAASKWNLLTFDTEEDVAVSLAKYTAELSGKFAAERGAFTVVLSGGTLIDTLRKLAEPPYLETVQWSKWHVFWVDERVVPKDHVDSNYKLAVDGLLSKVPIPTDQVYAINDTLSAEGAAADYETVLKQLVKNGVLAMSTATGFPRFDLMLLGMGPDGHLASLFPGHPLLNENQKWVTHIMDSPKPPPQRITFTFPVIKSSAYVAMVVTGPGEASAVKKVLSDDKTLPLLPTEMAILQDGEFTWFTDKQAVSMLQNK

SEQ ID NO: 347 - protein, 256 aa, Phleum pratense; identical to SEQ ID NO: 346

SEQ ID NO: 348 - protein, 256 aa, Phleum pratense
AAASKWNLLTFDTEEDVAVSLAKYTAELSGKFAAERGAFTVVLSGGTLIETLRKLAEPPYLETVQWSKWHVFWVDERVVPKDHVDSNYKLAVDGLLSKVPIPTDQVYAINDTLSAEGAAADYETVLKQLVKNGVLAMSTATGFPRFDLMLLGMGPDGHLASLFPGHPLLNENQKWVTHIMDSPKPPPQRITFTFPVIKSSAYVAMVVTGPGEASAVKKVLSDDKTLPLLPTEMAILQDGEFTWFTDKQAVSMLQNK

SEQ ID NO: 349 - protein, 256 aa, Phleum pratense
AAASKWNLLTFDTEEDVAVSLAKYTAELSGKFAAERGAFTVVLSGGTLIETLRKLAEPPYLETVQWSKWHVFWVDERVVPKDHVDSNYKLAVDGLLSKVPIPTDQVYAINDTLSAEGAAADYETVLKQLVKSGVLAMSTATGFPRFDLMLLGMGPDGHLASLFPGHPLLNENQKWVTHIMDSPKPPPQRITFTFPVIKSSAYVAMVVTGPGEASAVKKVLSDDKTLPLLPTEMAILQDGEFTWFTDKQAVSMLQNK

SEQ ID NO: 350 - protein, 256 aa, Phleum pratense
AAASKWNLLTFDTEEDVAVSLAKYTAELSGKFAAERGAFTVVLSGGTLIDTLRKLAEPPYLETVQWSKWHVFWVDERVVPKDHVDSNYKLAVDGLLSKVPIPTDQVYAINDTLSAEGAAADYETVLKQLVKSGVLAMSTATGFPRFDLMLLGMGPDGHLASLFPGHPLLNENQKWVTHIMDSPKPPPQRITFTFPVIKSSAYVAMVVTGPGEASAVKKVLSDDKTLPLLPTEMAILQDGEFTWFTDKQAVSMLQNK

SEQ ID NO: 351 - protein, 262 aa, Phleum pratense
TDAAAPAAASKWNLLTFDTEGDVAVSLAKYTAELSGKFAAERGAFTVVLSGGTLIDTLRKLAEPPYLETVQWSKWHVFWVDERVVPKDHVDSNYKLAVDGLLSKVPIPTDQVYAINDTLSAEGAAADYETVLKQLVKSGVLAMSTATGFPRFDLMLLGMGPDGHLASLFPGHPLLNENQKWVTHIMDSPKPPPQRITFTFPVIKSSAYVAMVVTGPGEASAVKKVLSDDKTLPLLPTEMAILQDGEFTWFTDKQAVSMLQNK

SEQ ID NO: 352 - protein, 194 aa, Phleum pratense
ATDAAAPAAASKWNLLTFDTEGDVAVSLAKYTAELSGKFAAERGAFTVVLSGGTLIDTLRKLAEPPYLETVQWSKWHVFWVDERVVPKDHVDSNYKLAVDGLLSKVPIPTDQVYAINDTLSAEGAAADYETVLKQLVKSGVLAMSTATGFPRFDLMLLGMGPDGHLASLFPGHPLLNENQKWVTHIMDSPKPPP

SEQ ID NO: 353 - protein, 395 aa, Phleum pratense
RAHIAFYQVCFEQKGCDRDDILAAVDEAIEDGVDVLSLSLGGNPGADFSEDPVSLGGYTAALNGVFVSTAAGNIGPNPATLSNGAPWLLTVGASTSDRRFAATVKLGSGLEVDGESLTEPKDYGKEMVPLVRDMGGGQCTSESVLKAQNITGKIIICEAGGGVSTAKAKMVLRAGAFGMIVVAPAVFGPVIVPRPHVLPTVQVPYAVGQKIKAYLEAESSPTANFIFKGTLFDTPRSPMMAPFSSRGPNVKSRGILKPDIIGPGVNVLAGVPGVVDMALQPKEVMPKFDIKSGTSMSCPHLAGIAALLKNAHPTWSPASIKSALMTTTETTDNTKKPIADVDGTQATYFATGAGHVNPKKAMDPGLVYNLTAAEYIPYLCGLKYTDQQVNSIIHP

SEQ ID NO: 354 - protein, 526 aa, Phleum pratense
RAHIAFYQVCFEQKGCDRDDILAAVDEAIEDGVDVLSLSLGGNPGADFSEDPVSLGGYTAALNGVFVSTAAGNIGPNPATLSNGAPWLLTVGASTSDRRFAATVKLGSGLEVDGESLTEPKDYGKEMVPLVRDMGGGQCTSESVLKAQNITGKIIICEAGGGVSTAKAKMVLRAGAFGMIVVAPAVFGPVIVPRPHVLPTVQVPYAVGQKIKAYLEAESSPTANFIFKGTLFDTPRSPMMAPFSSRGPNVKSRGILKPDIIGPGVNVLAGVPGVVDMALQPKEVMPKFDIKSGTSMSCPHLAGIAALLKNAHPTWSPASIKSALMTTTETTDNTKKPIADVDGTQATYFATGAGHVNPKKAMDPGLVYNLTAAEYIPYLCGLKYTDQQVNSIIHPEPPVTCDKLRKLDQKDLNYPSITVVVDKADSVVNASRAVTNVGVASSTYDVEVEVPKSVTVEVHPPKLTFKALEEVLNYTVTVKTAAVPDGAIEGQLKWVSSKHIVRSPILILPGTGEEDTTEAAAPSAQP

SEQ ID NO: 355 - protein, 350 aa, Phleum pratense
FGMIVVAPAVFGPVIVPRPHVLPTVQVPYAVGQKIKAYLEAESSPTANFIFKGTLFDTPRSPTMAPFSSRGPNVKSRGILKPDIIGPGVNVLAGVPGVVDIVLQPKEVMPKFDIKSGTSMSCPHLAGIAALLKNAHPTWSPASIKSALMTTTETTDNTKKPIADVDGTQATYFATGAGHVNPKKAMDPGLVYNLTAAEYIPYLCGLKYTDQQVNSIIHPEPPVTCDKLRKLDQKDLNYPSITVVVDKADSVVNASRAVTNVGVASSTYDVEVEVPKSVTVEVHPPKLTFKALEEVLNYTVTVKTAAVPDGAIEGQLKWVSSKHIVRSPILILPGTGEEDTTEAAAPSAQP

SEQ ID NO: 356 - protein, 237 aa, Phleum pratense
NKLIGARSFFESAKWKWKGLDDPVLPINEGQHGTHTSSTAAGAFVRGANISGNAVGTAAGMAPRAHIAFYQVCFEQKGCDRDDILAAVDEAIEDGVDVLSLSLGGNPGADFSEDPVSLGGYTAALNGVFVSTAAGNIGPNPATLSNGAPWLLTVGASTSDRRFAATVKLGSGLEVDGESLTEPKDYGKEMVPLVRDMGGGQCTSESVLKAQNITGKIIICEAGGGVSTAKAKMVLRA

SEQ ID NO: 357 - protein, 437 aa, Phleum pratense
TVGASTSDRRFAATVKLGSGLEVDGESLTEPKDYGKEMVPLVRDMGGGQCTSESVLKAQNITGKIIICEAGGGVSTAKAKMVLRAGAFGMIVVAPAVFGPVIVPRPHVLPTVQVPYAVGQKIKAYLEAESSPTANFIFKGTLFDTPRSPMMAPFSSRGPNVKSRGILKPDIIGPGVNVLAGVPGVVDIVLQPKEVMPKFDIKSGTSMSCPHLAGIAALLKNAHPTWSPASIKSALMTTTETTDNTKKPIADVDGTQATYFATGAGHVNPKKAMDPGLVYNLTAAEYIPYLCGLKYTDQQVNSIIHPEPPVTCDKLRKLDQKDLNYPSITVVVDKADSVVNASRAVTNVGVASSTYDVEVEVPKSVTVEVHPPKLTFKALEEVLNYTVTVKTAAVPDGAIEGQLKWVSSKHIVRSPILILPGTGEEDTTEAAAPSAQP

SEQ ID NO: 358 - protein, 487 aa, Phleum pratense
HIAFYQVCFEQKGCDRDDILAAVDEAIEDGVDVLSLSLGGNPGADFSEDPVSLGGYTAALNGVFVSTAAGNIGPNPATLSNGAPWLLTVGASTSDRRFAATVKLGSGLEVDGESLTEPKDYGKEMVPLVRDMGDGQCTSESVLKAQNITGKIIICEAGGGVSTAKAKMVLRAGAFGMIVVAPAVFGPVIVPRPHVLPTVQVPYAVGQKIKAYLEAESSPTANFIFKGTLFDTPRSPTMAPFSSRGPNVKSRGILKPDIIGPGVNVLAGVPGVVDIVLQPKEVMPKFDIKSGTSMSCPHLAGIAALLKNAHPTWSPASIKSALMTTTETTDNTKKPIADVDGTQATYFATGAGHVNPKKAMDPGLVYNLTAAEYIPYLCGLKYTDQQVNSIIHPEPPVTCDKLRKLDQKDLNYPSITVVVDKADSVVNASRAVTNVGVASSTYDVEVEVPKSVTVEVHPPKLTFKALEEVLNYTVTVKTAAVPDGAIE

SEQ ID NO: 359 - protein, 435 aa, Phleum pratense
GASTSDRRFAATVKLGSGLEVDGESLTEPKDYGKEMVPLVRDMGGGQCTSESVLKAQNITGKIIICEAGGGVSTAKAKMVLRAGAFGMIVVAPAVFGPVIVPRPHVLPTVQVPYAVGQKIKAYLEAESSPTANFIFKGTLFDTPRSPTMAPFSSRGPNVKSRGILKPDIIGPGVNVLAGVPGVVDMGLQPKEVMPKFDIKSGTSMSCPHLAGIAALLKNAHPTWSPASIKSALMTTTETTDNTKKPIADVDGTQATYFATGAGHVNPKKAMDPGLVYNLTAAEYIPYLCGLKYTDQQVNSIIHPEPPVTCDKLRKLDQKDLNYPSITVVLDKADSVVNASRAVTNVGVASSTYDVEVEVPKSVTVEVHPPKLTFKALEEVLNYTVTVKTAAVPDGAIEGQLKWVSSKHIVRSPILILPGTGEEDTTEAAAPSAQP

SEQ ID NO: 360 - protein, 481 aa, Phleum pratense
GCDRDDILAAVDEAIEDGVDVLSLSLGGNPGADFSEDPVSLGGYTAALNGVFVSTAAGNIGPNPATLSNGAPWLLTVGASTSDRRFAATVKLGSGLEVDGESLTEPKDYGKEMVPLVRDMGDGQCTSESVLKAQNITGKIIICEAGGGVSTAKAKMVLGADAFGMIVVAPAVFGPVIVPRPHVLPTVQVPYAVGQKIKAYLEAESSPTANFIFKGTLFDTPRSPMMAPFSSRGPNVKSRGILKPDIIGPGVNVLAGVPGVVDIVLQPKEVMPKFDIKSGTSMSCPHLAGIAALLKNAHPTWSPASIKSALMTTTETTDNTKKPIADVDGTQATYFATGAGHVNPKKAMDPGLVYNLTAAEYIPYLCGLKYTDQQVNSIIHPEPPVTCDKLRKLDQKDLNYPSITVVVDKADSVVNASRAVTNVGVASSTYDVEVEVPKSVTVEVHPPKLTFKALEEVLNYTVTVKTAAVPDGAIEGQLKWV

SEQ ID NO: 361 - protein, 512 aa, Phleum pratense
GCDRDDILAAVDEAIEDGVDVLSLSLGGNPGADFSEDPVSLGGYTAALNGVFVSTAAGNIGPNPATLSNGAPWLLTVGASTSDRRFAATVKLGSGLEVDGESLTEPKDYGKEMVPLVRDMGDGQCTSESVLKAQNITGKIIICEAGGGVSTAKAKMVLRAGAFGMIVVAPAVFGPVIVPRPHVLPTVQVPYAVGQKIKAYLEAESSPTANFIFKGTLFDTPRSPMMAPFSSRGPNVKSRGILKPDIIGPGVNVLAGVPGVVDIVLQPKEVMPKFDIKSGTSMSCPHLAGIAALLKNAHPTWSPASIKSALMTTTETTDNTKKPIADVDGTQATYFATGAGHVNPKKAMDPGLVYNLTAAEYIPYLCGLKYTDQQVNSIIHPEPPVTCDKLRKLDQKDLNYPSITVVVDKADSVVNASRAVTNVGVASSTYDVEVEVPKSVTVEVHPPKLTFKALEEVLNYTVTVKTAAVPDGAIEGQLKWVSSKHIVRSPILILPGTGEEDTTEAAAPSAQP

SEQ ID NO: 362 - protein, 512 aa, Phleum pratense
GCDRDDILAAVDEAIEDGVDVLSLSLGGNPGADFSEDPVSLGGYTAALNGVFVSTAAGNIGPNPATLSNGAPWLLTVGASTSDRRFAATVKLGSGLEVDGESLTEPKDYGKEMVPLVRDMGGGQCTSESVLKAQNITGKIIICEAGGGVSTAKAKMVLGADAFGMIVVAPAVFGPVIVPRPHVLPTVQVPYAVGQKIKAYLEAESSPTANFIFKGTLFDTPRSPMMAPFSSRGPNVKSRGILKPDIIGPGVNVLAGVPGVVDIVLQPKEVMPKFDIKSGTSMSCPHLAGIAALLKNAHPTWSPASIKSALMTTTETTDNTKKPIADVDGTQATYFATGAGHVNPKKAMDPGLVYNLTAAEYIPYLCGLKYTDQQVNSIIHPEPPVTCDKLRKLDQKDLNYPSITVVVDKADSVVNASRAVTNVGVASSTYDVEVEVPKSVTVEVHPPKLTFKALEEVLNYTVTVKTAAVPDGAIEGQLKWVSSKHIVRSPILILPGTGEEDTTEAAAPSAQP

SEQ ID NO: 363 - protein, 81 aa, Phleum pratense
NNKLIGARSFFESAKWKWKGLDDPVLPINEGQHGTHTSSTAAGAFVRGANISGNAVGTAAGMAPRAHIAFYQVCFEQKGCD

SEQ ID NO: 364 - protein, 44 aa, Phleum pratense
PRSWSAVMLTFDNAGMWNVRSNVWERHYLGEQLYISVISPARSL

SEQ ID NO: 365 - protein, 57 aa, Phleum pratense
VSRHSIQVYPRSWSAVMLTFDNAGMWNVRSNVWERHYLGEQLYISVISPARSLRDEY

SEQ ID NO: 366 - protein, 55 aa, Phleum pratense
ELRKTYNLLDAVSRHSIQVYPRSWSAVMLTFDNAGMWNVRSNVWERHYLGEMTLM

SEQ ID NO: 367 - protein, 56 aa, Phleum pratense
ELRKTYNLLDAVSRHSIQVYPRSWSAVMLTFDNAGMWNVRSNVWERHYLAGEMTLM

SEQ ID NO: 368 - protein, 55 aa, Phleum pratense
ELRKTYNLLDAVSRHSIQVYPRSWSAVMLTFDNAGMWNVRSNVWERHYLGEQLYI

SEQ ID NO: 369 - protein, 52 aa, Phleum pratense
TYNLLDAVSRHSIQVYPRSWSAVMLTFDNAGMWNVRSNVWERHYLAGEMTLM

SEQ ID NO: 370 - protein, 239 aa, Phleum pratense
RGGFSGLFPDSSEYAFRTAVSSSMPGVVLFCDLKFSSDGVGFCIGNLRLDNTTLIDKDFASRGSTYQVNGQDVQGWFSLDFKSKELHEIPMIQNILSRSQIFDGIPNLMSLDNVVKIVDPNEIWVNVEYDSFYREHGLSSEDYILGLPKEFPVTWVSSPEVALLKSLAGKLRNSTKLIFRFLREDLVEPTTKMTYGELLKDLKSIKAFASGILVPKQFIWPMNKDMYLEPSTSLVKDAH

SEQ ID NO: 371 - protein, 88 aa, Phleum pratense
KIETELTKICEGILKLLETHLVPSSTAPESKVFYLKMKGDYHRYLAEFKSGAERKEAAESTMNSYKAAQDIALADLAPTHPIRLGLAL

SEQ ID NO: 372 - protein, 53 aa, Phleum pratense
GDYHRYLAEFKSGAERKEAAESTMNSYKAAQDIALADLAPTHPIRLGLALKIS

SEQ ID NO: 373 - protein, 90 aa, Phleum pratense
KDYRGKIETELTKICEGILKLLETHLVPSSTAPESKVFYLKMKGDYHRYLAEFKSGAERKEAAESTMNSYKAAQDIALADLAPTHPIRLG

SEQ ID NO: 374 - protein, 67 aa, Phleum pratense
SAGAAESKVFYLKMKGDYHRYLAEFKSGAERKEAAESTMNSYKAAQDIALADLAPTHPIRLGLALNF

SEQ ID NO: 375 - protein, 128 aa, Phleum pratense
VSCADIVALGTRDAVRISGGPAYEVPTGRRDSLVSNREEADNNLPGPDIPIPKLTSEFLSRGFTPEEMVVLLAGGHSIGKVRCIFIEPDATPMDPGYQASISKLCDGPNRDTGFVNMDEHNPNVGEVA

SEQ ID NO: 376 - protein, 374 aa, Phleum pratense
LLGLLAPLASAQLSREFYKASCPDAEKIVAAVIEKKLKEDPGPAAGLLRLLFHDCFANGCDASILIDPLSNQSAEKEAGPNISVRGFEVIDDIKKELEAKCPKTVSCADIVALGTRDAVRISGGPAYEVPTGRRDSLVSNREEADNNLPGPDIPIPKLTSEFLSRGFTPEEMVVLLAGGHSIGKVRCIFIEPDATPMDPGYQASISKLCDGPNRDTGFVNMDEHNPNVIDSSYFANVLAKKMPLTVDRLLGLDSKTTPIIKNMLNKPNDFMPTFAKAMEKLSVLKVITGKDGEIRKSCSEFNNPMPSTGGSVIRISSANPEDLEGLSSGGTQVAGIVSQGTKDPWHVKTLKAAGAAHPKKVTGRHPKLRGAHPQ

SEQ ID NO: 377 - protein, 374 aa, Phleum pratense
LLGLLAPLASAQLSREFYKASCPDAEKIVAAVIEKKLKEDPGTAAGLLRLLFHDCFANGCDASILIDPLSNQSAEKEAGPNISVRGFEVIDDIKKELEAKCPKTVSCADIVALGTRDAVRISGGPAYEVPTGRRDSLVSNREEADNNLPGPDIPIPKLTSEFLSRGFTPEEMVVLLAGGHSIGKVRCIFIEPDATPMDPGYQASISKLCDGPNRDTGFVNMDEHNPNVIDSSYFANVLAKKMPLTVDRLLGLDSKTTPIIKNMLNKPNDFMPTFAKAMEKLSVLKVITGKDGEIRKSCSEFNNPMPSTGGSVIRISSANPEDLEGLSSGGTQVAGIVSQGTKDPWHVKTLKAAGAAHPKKVTGRHPKLRGAHPQ

SEQ ID NO: 378 - protein, 65 aa, Phleum pratense
GCDASILIDPLSNQSAEKEAGPNISVRGFEVIDDIKKELEAKCPKTVSCADIVALGTRDAVRISG

SEQ ID NO: 379 - protein, 247 aa, Phleum pratense
PAYEVPTGRRDSLVSNREEADNNLPGPDIPIPKLTSEFLSRGFTPEEMVVLLAGGHSIGKVRCIFIEPDATPMDPGYQASISKLCDGPNRDTGFVNMDEHNPNVIDSSYFANVLAKKMPLTVDRLLGLDSKTTPIIKNMLNKPNDFMPTFAKAMEKLSVLKVIAGKDGEIRKSCSEFNNPMPSTGGSVIRISSANPEDLEGLSSGGTQVAGIVSQGTKDPWHVKTLKAAGAAHPKKVTGRHPKLRGA

SEQ ID NO: 380 - protein, 374 aa, Phleum pratense
LLGLLAPLASAQLSREFYKASCPDAEKIVAAVIEKKLKEDPGTAAGLLRLLFHDCFANGCDASILIDPLSNQSAEKEAGPNISVRGFEVIDDIKKELEAKCPKTVSCADIVALGTRDAVRISGGPAYEVPTGRRDSLVSNREEADNNLPGPDIPIPKLTSEFLSRGFTPEEMVVLLAGGHSIGKVRCIFIEPDATPMDPGYQASISKLCDGPNRDTGFVNMDEHNPNVIDSSYFANVLAKKMPLTVDRLLGLDSKTTPIIKNMLNKPNDFMPTFAKAMEKLSVLKAIPGKDGEIRKSCSEFNNPMPSTGGSVIRISSANPEDLEGLSSGGTQVAGIVSQGTKDPWHVKTLKAAGAAHPKKVTGRHPKLRGAHPQ

SEQ ID NO: 381 - protein, 227 aa, Phleum pratense
LLGLLAPLASAQLSREFYKASCPDAEKIVAAVIEKKLKEDPGTAAGLLRLLFHDCFANGCDASILIDPLSNQSAEKEAGPNISVRGFEVIDDIKKELEAKCPKTVSCADIVALGTRDAVRISGGPAYEVPTGRRDSLVSNREEADNNLPGPDIPIPKLTSEFLSRGFTPEEMVVLLAGGHSIGKVRCIFIEPDATPMDPGYQASISKLCDGPNRDTGFVNMDEHNPN

SEQ ID NO: 382 - protein, 216 aa, Phleum pratense
KASCPDAEKIVAAVIEKKLKEDPGTAAGLLRLLFHDCFANGCDASILIDPLSNQSAEKEAGPNISVRGFEVIDDIKKELEAKCPKTVSCADIVALGTRDAVRISGGPAYEVPTGRRDSLVSNREEADNNLPGPDIPIPKLTSEFLSRGFTPEEMVVLLAGGHSIGKVRCIFIEPDATPMDPGYQASISKLCDGPNRDTGFVNMDEHNPNVIDSSYF

SEQ ID NO: 383 - protein, 177 aa, Phleum pratense
LFHDCFANGCDASILIDPLSNQSAEKEAGPNISVRGFEVIDDIKKELEAKCPKTVSCADIVALGTRDAVRISGGPAYEVPTGRRDSLVSNREEADNNLPGPDIPIPKLTSEFLSRGFTPEEMVVLLAGGHSIGKVRCIFIEPDATPMDPGYQASISKLCDGPNRDTGFVNMDEHNPN

SEQ ID NO: 384 - protein, 172 aa, Phleum pratense
WSEIQTLKPNLIGPFAAAGMDRNPVAKNAGKFMTLAGFLDYAKASNISGILIGIEHAAYLATRGLDVVDAVSNALIKSGYDKETKQQVFIQSEDPPVLSAFKKFPKFNRVFEIEFDIRDVSKPSVVEIKEFANAVKLRRSSAAQVDGFYLTGFNAVVERLRDADIQVHVGVL

SEQ ID NO: 385 - protein, 225 aa, Phleum pratense
IQTLKPNLIGPFAAAGMDRNPVAKNAGKFMTLAGFLDYAKASNISGILIGIEHAAYLATRGLDVVDAVSNALIKSGYDKETKQQVFIQSEDPPVLSAFKKFPKFNRVFEIEFDIRDVSKPSVVEIKEFANAVKLRRSSAAQVDGFYLTGFNAVVERLRDADIQVHVGVLKNEFMSLAFDYWADPMVEIATDTWSVLADGLVTEFPSTAAAYFSKWWYLLLDQKTV

SEQ ID NO: 386 - protein, 300 aa, Phleum pratense
EIQTLKPNLIGPFAAAGMDRNPVAKNAGKFMTLAGFLDYAKASNISGILIGIEHAAYLATRGLDVVDAVSNALIKSGYDKETKQQVFIQSEDPPVLSAFKKFPKFNRVFEIEFDIRDVSKPSVVEIKEFANAVKLRRSSAAQVDGFYLTGFNAVVERLRDADIQVHVGVLKNEFMSLAFDYWADPMVEIATDTWSVLADGLVTEFPSTAAAYFRSPCSDIKRNMSYTIKPGEPGALVDMAAYGALPPAPPPAPVLEPADVHRQPLPLCPTEPMFRTFRCRLPPKETGKNAEYTANLAADG

SEQ ID NO: 387 - protein, 301 aa, Phleum pratense
SEIQTLKPNLIGPFAAAGMDRNPVAKNAGKFMTLAGFLDYAKASNISGILIGIEHAAYLATRGLDVVDAVSNALIKSGYDKETKQQVFIQSEDPPVLSAFKKFPKFNRVFEIEFDIRDVSKPSVVEIKEFANAVKLRRSSAAQVDGFYLTGFNAVVERLRDADIQVHVGVLKNEFMSLAFDYWADPMVEIATDTWSVLADGLVTEFPSTAAAYFRSPCSDIKRNMSYTIKPGEPGALVDMAAYGALPPAPPPAPVLEPADVHRQPLPLCPTEPMFRTFRCRLPPKETGKNAEYTANLAADG

SEQ ID NO: 388 - protein, 214 aa, Phleum pratense
SEIQTLKPNLIGPFAAAGMDRNPVAKNAGKFMTLAGFLDYAKASNISGILIGIEHAAYLATRGLDVVDAVSNALIKSGYDKETKQQVFIQSEDPPVLSAFKKFPKFNRVFEIEFDIRDVSKPSVVEIKEFANAVKLRRSSAAQVDGFYLTGFNAVVERLRDADIQVHVGVLKNEFMSLAFDYWADPMVEIATDTWSVLADGLVTEFPSTAAAYF

SEQ ID NO: 389 - protein, 256 aa, Phleum pratense
ISGILIGIEHAAYLATRGLDVVDAVSNALIKSGYDKETKQQVFIQSEDPPVLSAFKKFPKFNRVFEIEFDIRDVSKPSVVEIKEFANAVKLRRSSAAQVDGFYLTGFNAVVERLRDADIQVHVGVLKNEFMSLAFDYWADPMVEIATDTWSVLADGLVTEFPSTAAAYFRSPCSDIKRNMSYTIKPGEPGALVDMAAYGALPPAPPPAPVLEPADVHRQPLPLCPTEPMFRTFRCRLPPKETGKNAEYTANLAADG

SEQ ID NO: 390 - protein, 247 aa, Phleum pratense
HAAYLATRGLDVVDAVSNALIKSGYDKETKQQVFIQSEDPPVLSAFKKFPKFNRVFEIEFDIRDVSKPSVVEIKEFANAVKLRRSSAAQVDGFYLTGFNAVVERLRDADIQVHVGVLKNEFMSLAFDYWADPMVEIATDTWSVLADGLVTEFPSTAAAYFRSPCSDIKRNMSYTIKPGEPGALVDMAAYGALPPAPPPAPVLEPADVHRQPLPLCPTEPMFRTFRCRLPPKETGKNAEYTANLAADG

SEQ ID NO: 391 - protein, 114 aa, Phleum pratense
LDVVDAVSNALIKSGYDKETKQQVFIQSEDPPVLSAFKKFPKFNRVFEIEFDIRDVSKPSVVEIKEFANAVKLRRSSAAQVDGFYLTGFNAVVERLRDADIQVHVGVLKNEFMS

SEQ ID NO: 392 - protein, 252 aa, Phleum pratense
WSEIQTLKPNLIGPFAAAGMDRNPVAKNAGKFMTLAGFLDYAKASNISGILIGIEHAAYLATRGLDVVDAVSNALIKSGYDKETKQQVFIQSEDPPVLSAFKKFPKFNRVFEIEFDIRDVSKPSVVEIKEFANAVKLRRSSAAQVDGFYLTGFNAVVERLRDADIQVHVGVLKNEFMSLAFDYWADPMVEIATDTWSVLADGLVTEFPSTAAAYFRSPCSDIKRNMSYTIKPGEPGALVDMAAYGALPPAPP

SEQ ID NO: 393 - protein, 77 aa, Phleum pratense
DGLPGTNCPVAPGTNFTYKWQPKDQIGSFFYFPSIGMQRTVGGYGLISVVSRLLIPVPFDPPADDLQVIIGDWYTKD

SEQ ID NO: 394 - protein, 145 aa, Phleum pratense
HVPLEEHVGTKTVLGVPQKVILINGEFPGPRINCSSNNNIVVNVFNQLDQPLLFTWNGIQHRKNSWQDGLPGTNCPVAPGTNFTYKWQPKDQIGSFFYFPSIGMQRTVGGYGLISVVSRLLIPVPFDPPADDLQVIIGDWYTKDH

SEQ ID NO: 395 - protein, 78 aa, Phleum pratense
DGLPGTNCPVAPGTNFTYKWQPKDQIGSFFYFPSIGMQRTVGGYGLISVVSRLLIPVPFDPPADDLQVIIGDWYTKDH

SEQ ID NO: 396 - protein, 53 aa, Phleum pratense
VAPGTNFTYKWQPKDQIGSFFYFPSIGMQRTVGGYGLISVVSRLLIPVPFDPP

SEQ ID NO: 397 - protein, 65 aa, Phleum pratense
TNFTYKWQPKDQIGSFFYFPSIGMQRTVGGYGLISVVSRLLIPVPFDPPADDLQVIIGDWYTKDH

SEQ ID NO: 398 - protein, 67 aa, Phleum pratense
TNFTYKWQPKDQIGSFFYFPSIGMQRTVGGYGLISVVSRLLIPVPFDPPADDLQVIIGDWYTKDHTV

SEQ ID NO: 399 - protein, 47 aa, Phleum pratense
PKFRRVLVIDPVISGASKPSIGEIKGFADAVMVSRGSLVRVNGFFLT

SEQ ID NO: 400 - protein, 56 aa, Phleum pratense
SVLSVFKKFPKFRRVLVIDPVISGASKPSIGEIKGFADAVMVSRGSLVRVNGFFLT

SEQ ID NO: 401 - protein, 64 aa, Phleum pratense
VFIQSDDSSVLSVFKKFPKFRRVLVIDPVISGASKPSIGEIKGFADAVMVSRGSLVRVNGFFPT

SEQ ID NO: 402 - protein, 56 aa, Phleum pratense
LNTESTEEFPKFRRVLVIDPVISGASKPSIGEIKGFADAVMVSRGSLVRVNGFFLT

SEQ ID NO: 403 - protein, 83 aa, Phleum pratense
QQVFIQSDDSSVLSVFKKFPKFRRVLVIDPVISGASKPSIGEIKGFADAVMVSRGSLVRVNGFFLTGFNDLVTEIHDANLSLH

SEQ ID NO: 404 - protein, 49 aa, Phleum pratense
TEEFPKFRRVLVIDPVISGASKPSIGEIKGFADAVMVSRGSLVRVNGFF

SEQ ID NO: 405 - protein, 37 aa, Phleum pratense
RQPGPLRGLNTKIASFLDPDGWKVVLVDHADFLKELH

SEQ ID NO: 406 - protein, 46 aa, Phleum pratense
TKELGGKILRQPGPLPGLNTKIASFLDPDGWKVVLVDHADFLKELH

SEQ ID NO: 407 - protein, 141 aa, Phleum pratense
ILQDNAKIVQIDSSIQARTVGAGSGGFSRLVCLRVHPTFTLLHPTEVVVAFTAINGSRQEVSPESGEVTLEGDLRPNGEWMLVDKCAGVSLVNRFEISQVSKCLVHWGTGDLNMELWSEERPVSKDTPLRICHQYELRQTS

SEQ ID NO: 408 - protein, 111 aa, Phleum pratense
VRTTDSRCMDLADPCSEYFVEAYLNNPLVQKAIHANTALNYPWTGCRTRTYNLRRFGDSPPSMLAHIKALVTTGIRIWLYSGELYAMVPVTASKHSWKKLRLEVVKDWRPW

SEQ ID NO: 409 - protein, 110 aa, Phleum pratense
DLADPCSEYFVEAYLNNPLVQKAIHANTALNYPWTGCRTRTYNLRRFGDSPPSMLPHLKALVTTGIRIWLYSGELYAMVPVTASKHSVEKLRLEVVKDWRPWSTAPGQDV

SEQ ID NO: 410 - protein, 64 aa, Phleum pratense
NPLVQKAIHANTALNYPWTGCRTRTYNLRRFGASPPSMLAHIKALVTTASASGCTAATWTRWCP

SEQ ID NO: 411 - protein, 64 aa, Phleum pratense
NPLVQKAIHANTALNYPWTGCRTRTYNLRRFGDSPPSMLAHIKALVTTASASGCTAATWTRWCP

SEQ ID NO: 412 - protein, 106 aa, Phleum pratense
NNPLVQKAIHANTALNYPWTGCRTRTYNLRRFGDSPPSMLAHIKALVTTGIRIWLYSGDLDAMVPVTASKHSVEKLRLEVVKDWRPWSTAPGQDVGGYVIEYKGLV

SEQ ID NO: 413 - protein, 65 aa, Phleum pratense
NNPLVQKAIHANTALNYPWTGCRTRTYNLRRFGDSPPSMLAHIKALVTTGIRSPLYSQMRMRWCP

SEQ ID NO: 414 - protein, 65 aa, Phleum pratense; identical to SEQ ID NO: 413

SEQ ID NO: 415 - protein, 76 aa, Phleum pratense
KVRTTDSRCMDLADPCSEYFVEAYLNNPLVQKAIHANTALNYPWTGCRTRTYNLRRFGDSPPSMLAHIKALVTTGI

SEQ ID NO: 416 - protein, 79 aa, Phleum pratense
AIHANTALNYPWTGCRTRTYNLRRFGDSPPSMLAHIKVLVTTGIRIWLYSGDLDAMVPVTASKHSVEKLRLEVVKDWRP

SEQ ID NO: 417 - protein, 66 aa, Phleum pratense
KAIHANTALNYPWTGCRTRTYNLRRFGDSPPSMLAHIKVLVTTGIRIWLYSGDLDAMVPVTASKHS

SEQ ID NO: 418 - protein, 59 aa, Phleum pratense
QKAIHANTALNYPWTGCRTRTYNLRRFGDSPPSMLAHIKALVTTGIRIWLYSGDLGAMV

SEQ ID NO: 419 - protein, 98 aa, Phleum pratense
QKAIHANTALNYPWTGCRTRTYNLRRFGDSPPSMLAHIKALVTTGIRIWLYSGDLGAMVPVTASKHSVEKLRLEVVKDWRPWSTAPGQDVGGYVIEYK

SEQ ID NO: 420 - protein, 130 aa, Phleum pratense
ACIGETLEQREAGTTMEVVAAQTKAIAEKISDWTNVVLAYEPVWAIGTGKVASRAQAQEVHDGLRKWLHANVGPAVAESTRIIYGGSVNGANCKELAAQPDLDGFLVGGASLKPEFVDIIKSATVKSSSA

SEQ ID NO: 421 - protein, 270 aa, Phleum pratense
PHTASDSPHRADQPMAPRKFFVGGNWKCNGASDDVKKIATVLNEAEVPSEDAVEVVVSPPFVFLQQAKALLRPDFAVAAQNCWVRKGGAFTGEISAEMLVNLQVPWVILGHSERRALLSESNDFVADKVAYALAQGLKVIACIGETLEQREAGTTMEVVAAQTKAIAEKISDWTNVVLAYEPVWAIGTGKVASRAQAQEVHDGLRKWLHANVGPAVAESTRIIYGGSVNGANCKELAAQPDLDGFLVGGASLKPEFVDIIKSATVKSSSA

SEQ ID NO: 422 - protein, 270 aa, Phleum pratense; identical to SEQ ID NO: 421

SEQ ID NO: 423 - protein, 271 aa, Phleum pratense
RPHTASDSPHRADQPMAPRKFFVGGNWKCNGTSDDVKKIVTVLNEAEVPSEDAVEVVVSPPFVFLQQAKALLRPDFAVAAQNCWVRKGGAFTGEISAEMLVNLQVPWVILGHSERRALLSESNDFVADKVAYALAQGLKVIACIGETLEQREAGTTMEVVAAQTKAIAEKISDWTNVVLAYEPVWAIGTGKVASRAQAQEVHDGLRKWLHANVGPAVAESTRIIYGGSVNGANCKELAAQPDLDGFLVGGASLKPEFVDIIKSATVKSSSA

SEQ ID NO: 424 - protein, 256 aa, Phleum pratense
MAPRKFFVGGNWKCNGTSDDVKKIVTVLNEAEVPSEDAVEVVVSPPFVFLQQAKALLRPDFAVAAQNCWVRKGGAFTGEISAEMLVNLQVPWVILGHSERRALLSESNDFVADKVAYALAQGLKVIACIGETLEQREAGTTMEVVAAQTKAIAEKISDWTNVVLAYEPVWAIGTGKVASRAQAQEVHDGLRKWLHANVGPAVAESTRIIYGGSVNGANCKELAAQPDLDGFLVGGASLKPEFVDIIKSATVKSSSA

SEQ ID NO: 425 - protein, 244 aa, Phleum pratense
MQNGTSDDVKKIVTVLNEAEVPSEDAVEVVVSPPFVFLQQAKALLRPDFAVAAQNCWVRKGGAFTGEISAEMLVNLQVPWVILGHSERRALLSESNDFVADKVAYALAQGLKVIACIGETLEQREAGTTMEVVAAQTKAIAEKISDWTNVVLAYEPVWAIGTGKVASRAQAQEVHDGLRKWLHANVGPAVAESTRIIYGGSVNGANCKELAAQPDLDGFLVGGASLKPEFVDIIKSATVKSSSA

SEQ ID NO: 426 - protein, 271 aa, Phleum pratense
RPHTASDSPHRADQPMAPRKFFVGGNWKCNGASDDVKKIVTVLNEAEVPSEDAVEVVVSPPFVFLQQAKALLRPDFAVAAQNCWVRKGGAFTGEISAEMLVNLQVPWVILGHSERRALLSESNDFVADKVAYALAQGLKVIACIGETLEQREAGTTMEVVAAQTKAIAEKISDWTNVVLAYEPVWAIGTGKVASRAQAQEVHDGLRKWLHANVGPAVAESTRIIYGGSVNGANCKELAAQPDLDGFLVGGASLKPEFVDIIKSATVKSSSA

SEQ ID NO: 427 - protein, 270 aa, Phleum pratense
PHTASDSPHRADQPMAPRKFFVGGNWKCNGASDDVKKIVTVLNEAEVPSEDAVEVVVSPPFVFLQQAKALLRPDFAVAAQNCWVRKGGAFTGEISAEMLVNLQVPWVILGHSERRALLSESNDFVADKVAYALAQGLKVIACIGETLEQREAGTTMEVVAAQTKAIAEKISDWTNVVLAYEPVWAIGTGKVASRAQAQEVHDGLRKWLHANVGPAVAESTRIIYGGSVNGANCKELAAQPDLDGFLVGGASLKPEFVDIIKSATVKSSSA

SEQ ID NO: 428 - protein, 215 aa, Phleum pratense
VVSPPFVFLQQAKALLRPDFAVAGQNCWVRKGGAFTGEISAEMLVNLQVPWVILGHSERRALLSESNDFVADKVAYALAQGLKVIACIGETLEQREAGTTMEVVAAQTKAIAEKISDWTNVVLAYEPVWAIGTGKVASRAQAQEVHDGLRKWLHANVGPAVAESTRIIYGGSVNGANCKELAAQPDLDGFLVGGASLKPEFVDIIKSATVKSSSA

SEQ ID NO: 429 - protein, 173 aa, Phleum pratense
GGTVTREPGPVKGGKSVIAFIEDPDGYKFELIERGPTPEPLCQVMLRVGDLDRAIKFYEKAFGMELLRRKDNPQYKYTIAMMGYGPEDKNAVLELTYNYGVKEYDKGNAYAQIAIGTDDVYKTAEVVRQNGGQITREPGPLPGISTKITACTDPDGWKSVFVDNLDFLKELEE

SEQ ID NO: 430 - protein, 156 aa, Phleum pratense
IAFIEDPDGYKFELIERGPTPEPLCQVMLRVGDLDRAIKFYEKAFGMELLRRKDNPQYKYTIAMMGYGPEDKNAVLELTYNYGVKEYDKGNAYAQIAIGTDDVYKTAEVVRQNGGQITREPGPLPGISTKITACTDPDGWKSVFVDNLDFLKELEE

SEQ ID NO: 431 - protein, 156 aa, Phleum pratense; identical to SEQ ID NO: 430

SEQ ID NO: 432 - protein, 156 aa, Phleum pratense; identical to SEQ ID NO: 430

SEQ ID NO: 433 - protein, 231 aa, Phleum pratense
LGMKLLRKRDIPEERYTNAFLGYGPEDSHFVVELTYNYGVESYDIGSGFGHFGIAVEDVEKTVELIKAKGGTVTREPGPVKGGKSVIAFIEDPDGYKFELIERGPTPEPLCQVMLRVGDLDRAIKFYEKAFGMELLRRKDNPQYKYTIAMMGYGPEDKNAVLELTYNYGVKEYDKGNAYAQIAIGTDDVYKTAEVVRQNGGQITREPGPLPGISTKITACTDPAIWICAGS

SEQ ID NO: 434 - protein, 191 aa, Phleum pratense
FGIAVEDVEKTVELIKAKGGTVTREPGPVKGGKSVIAFIEDPDGYKFELIERGPTPEPLCQVMLRVGDLDRAIKFYEKAFGMELLRRKDNPQYKYTIAMMGYGPEDKNAVLELTYNYGVKEYDKGNAYAQIAIGTDDVYKTAEVVRQNGGQITREPGPLPGISTKITACTDPDGWKSVFVDNLDFLKELEE

SEQ ID NO: 435 - protein, 191 aa, Phleum pratense; identical to SEQ ID NO: 434

SEQ ID NO: 436 - protein, 101 aa, Phleum pratense
KSVIAFIEDPDGYKFELIERGPTPEPLCQVMLRVGDLDRAIKFYEKAFGMELLRRKDNPQYKYTIAMMGYGPEDKNAVLELTYNYGVKEYDKGNAYAQVDI

SEQ ID NO: 437 - protein, 36 aa, Phleum pratense
LQSKNCILYLCSIMICNCKVSKVLNTYIFLLYLEHT

SEQ ID NO: 438 - protein, 79 aa, Phleum pratense
QSKQMANPTTAAGVLRIFFHDCFVSGCDASVLIAPTHYAKSEKDADINHSLPGDAFDAVVRSKLALELECPGVVSCADI

SEQ ID NO: 439 - protein, 355 aa, Phleum pratense
PKSHTRVGSTYQPAAMRRLSLILLAAAALLAAAVSAEPGPAPKLSPDFYSQTCPRAERIIAEVVQSKQMANPTTAAGVLRVFFHDCFVSGCDASVLIAPTHYAKSEKDADINHSLPGDAFDAVVRSKLALELECPGVVSCADILAIASRVLVTMTGGPRYPVPLGRKDSLSSNPAAPDVELPHSNFTVGRIIELFTAKGFTVQEMVALSGAHTLGFSHCQEFASRIYNYRDKGGKPAPFDPSMNPTYAKGLQAACQDYQKDPTIAAFNDIMTPGKFDNIYSVNIERGLGLLSTDEDMWSDMRTKPFVQRYAANNTDFFEDFAKAIEKLSMYGVKTGADGEIRRRCDAFNSGPNIQ

SEQ ID NO: 440 - protein, 173 aa, Phleum pratense
MRRLSLLLLAAAALLAAAVSAEPGPAPKLSPDFYSQTCPRAERIIAEVVQSKQMANPTTAAGVLRVFFHDCFVSGCDASVLIAPTHYAKSEKDADINHSLPGDAFDAVVRSKLALELECPGVVSCADILAIASRVLVTMTGGPRYPVPLGRKDSLSSNPAAPDVELPHSNFTV

SEQ ID NO: 441 - protein, 64 aa, Phleum pratense
AAGVLRVFFHDCFVSGCDASVLIAPTHYAKSEKDADINHSLPGDAFDAVVRSKLALELECPGVV

SEQ ID NO: 442 - protein, 214 aa, Phleum pratense
PKSHTRVGSTYQPAAMRRLSLILLAAAALLAAAVSAEPGPAPKLSPDFYSQTCPRAERIIAEVVQSKQMANPTTAAGVLRVFFHDCFVSGCDASVLIAPTHYAKSEKDADINHSLPGDAFDAVVRSKLALELECPGVVSCADILAIASRVLVTMTGGPRYPVPLGRKDSLSSNPAAPDVELPHSNFTVGRIIELFTAKGFTVQEMVALSGAHTL

SEQ ID NO: 443 - protein, 214 aa, Phleum pratense; identical to SEQ ID NO: 442

SEQ ID NO: 444 - protein, 213 aa, Phleum pratense
PKSHTRVGSTYQPAAMRRLSLILLAAAALLAAAVSAEPGPAPKLSPDFYSQTCPRAERIIAEVVQSKQMANPTTAAGVLRVFFHDCFVSGCDASVLIAPTHYAKSEKDADINHSLPGDAFDAVVRSKLALELECPGVVSCADILAIASRVLVTMTGGPRYPVPLGRKDSLSSNPAAPDVELPHSNFTVGRIIELFTAKGFTVQEMVALSGAHT

SEQ ID NO: 445 - protein, 215 aa, Phleum pratense
PKSHTRVGSTYQPAAMRRLSLILLAAAALLAAAVSAEPGPAPKLSPDFYSQTCPRAERIIAEVVQSKQMANPTTAAGVLRVFFHDCFVSGCDASVLIAPTHYAKSEKDADINHSLPGDAFDAVVRSKLALELECPGVVSCADILAIASRVLVTMTGGPRYPVPLGRKDSLSSNPAAPDVELPHSNFTVGRIIELFTAKGFTVQEMVALSGAHTLG

SEQ ID NO: 446 - protein, 134 aa, Phleum pratense
FFHDCFVSGCDASVLIAPTHYAKSEKDADINHSLPGDAFDAVVRSKLALELECPGVVSCADILAIASRVLVTMTGGPRYPVPLGRKDSLSSNPAAPDVELPHSNFTVGRIIELFTAKGFTVQEMVALSGAHTLG

SEQ ID NO: 447 - protein, 279 aa, Phleum pratense
PKSHTRVGSTYQPAAMRRLSLILLAAAALLAAAVSAEPGPAPKLSPDFYSQTCPRAERIIAEVVQSKQMANPTTAAGVLRVFFHDCFVSGCDASVLIAPTHYAKSEKDADINHSLPGDAFDAVVRSKLALELECPGVVSCADILAIASRVLVTMTGGPRYPVPLGRKDSLSSNPAAPDVELPHSNFTVGRIIELFTAKGFTVQEMVALSGAHTLGFSHCQEFASRIYNYRDKGGKPAPFDPSMNPTYAKGLQAACQDYQKDPTIAAFNDIMSSSVLSSP

SEQ ID NO: 448 - protein, 127 aa, Phleum pratense
PHMLLILLLLHGANAALDEPVQKWQTLDGSPPLVIARGGFSGLFPESSLYAYQFAMSNGLPDVVLHCDLQLSSDGKGFCRSGLRLDKSTLIAEVFPKRDKTYKLGTEDIHGWFAVDFTAAELVNNVT

SEQ ID NO: 449 - protein, 132 aa, Phleum pratense
MGGRYPHMLLILLLLHGANAALDEPVQKWQTLDGSPPLVIARGGFSGLFPESSLYAYQFAMSNGLPDVVLHCDLQLSSDGKGFCRSGLRLDKSTLIAEVFPKRDKTYKLGTEDIHGWFAVDFTAAELVNNVT

SEQ ID NO: 450 - protein, 142 aa, Phleum pratense
MGGRYPHMLLILLLLHGANAALDEPVQKWQTLDGSPPLVIARGGFSGLFPESSLYAYQFAMSNGLPDVVLHCDLQLSSDGKGFCRSGLRLDKSTLIAEVFPKRDKTYKLGTEDIHGWFAVDFTAAELVNNVTGMHPKLSNLL

SEQ ID NO: 451 - protein, 132 aa, Phleum pratense; identical to SEQ ID NO: 449

SEQ ID NO: 452 - protein, 179 aa, Phleum pratense
HAANAGLGMLEPIKEEIPTISYSDLYQLAGVVAVEVSGGPVIPFHPGREDKPQPPPEGRLPDATKGSDHLRQVFGKQMGLSDQDIVALSGGHTLGRCHKERSGFEGPWTKNPLKFDNTYFTELLSGDKEGLIQLPSDKTLLTDPVFRPLVEKYAADEKAFFEDYKEAHLRLSELGYAEA

SEQ ID NO: 453 - protein, 180 aa, Phleum pratense
AHAANAGLGMLEPIKEEIPTISYSDLYQLAGVVAVEVSGGPVIPFHPGREDKPQPPPEGRLPDATKGSDHLRQVFGKQMGLSDQDIVALSGGHTLGRCHKERSGFEGPWTKNPLKFDNTYFTELLSGDKEGLIQLPSDKTLLTDPVFRPLVEKYAADEKAFFEDYKEAHLRLSELGYAEA

SEQ ID NO: 454 - protein, 90 aa, Phleum pratense
GGHTLGRCHKERSGFEGPWTKNPLKFDNTYFTELLSGDKEGLLQLPSDKTLLTDPVFRPLVEKYAADEKAFFEDYKEAHLRLSELGYAEA

SEQ ID NO: 455 - protein, 133 aa, Phleum pratense
HLQDKPQPPPEGRLPDATKGSDHLRQVFGKQMGLSDQDIVALSGGHTLGRCHKERSGFEGPWTKNPLKFDNTYFTELLSGDKEGLLQLPSDKTLLTDPVFRPLVEKYAADEKAFFEDYKEAHLRLSELGYAEA

SEQ ID NO: 456 - protein, 117 aa, Phleum pratense
PQEGVDHLRQVFGKQMGLSDQDIVALSGGHTLGRCHKERSGFEGPWTKNPLKFDNTYFTELLSGDKEGLIQLPSDKTLLTDPVFRPLVEKYAADEKAFFEDYKEAHLRLSELGYAEA

SEQ ID NO: 457 - protein, 117 aa, Phleum pratense; identical to SEQ ID NO: 456

SEQ ID NO: 458 - protein, 42 aa, Phleum pratense
RVQVVGPDGKRVLETRIEGGSLFIVPRFHVVSKIADASGMEW

SEQ ID NO: 459 - protein, 84 aa, Phleum pratense
KEVGLGADLVRIDAHSMCSPGFSCDSAYQVTYIVRGSGRVQVVGPDGKRVLETRIEGGSLFIVPRFHVVSKIADASGMEWFSII

SEQ ID NO: 460 - protein, 57 aa, Phleum pratense
RVQVVGPDGKRVLETRIEGGSLFIVPRFHVVSKIADASGMEWFSIITTPNPIFSHLA

SEQ ID NO: 461 - protein, 56 aa, Phleum pratense
YIVRGSGRVQVVGPDGKRVLETRIEGGSLFIVPRFHVVSKIADASGMEWFSIITTP

SEQ ID NO: 462 - protein, 58 aa, Phleum pratense
YQVTYIVRGSGRVQVVGPDGKRVLETRIEGGSLFIVPRFHVVSKIADASGMEWFSIIT

SEQ ID NO: 463 - protein, 50 aa, Phleum pratense
GSGRVQVVGPDGKRVLETRIEGGSLFIVPRFHVVSKIADASGMEWFSIIT

SEQ ID NO: 464 - protein, 67 aa, Phleum pratense
CDSAYQVTYIVRGSGRVQVVGPDGKRVLETRIEGGSLFIVPRFHVVSKIADASGMEWFSIITTPNPI

SEQ ID NO: 465 - protein, 75 aa, Phleum pratense
SMCSPGFSCDSAYQVTYIVRGSGRVQVVGPDGKRVLETRIEGGSLFIVPRFHVVSKIADASGMEWFSIITTPNPI

SEQ ID NO: 466 - protein, 113 aa, Phleum pratense
PGFSCDSAYQVTYIVRGSGRVQVVGPDGKRVLETRIEGGSLFIVPRFHVVSKIADASGMEWFSIITTPNPIFSHLAGKTSVWKAISPEVLEASFNTTPEMEKLFRSKRLDSEI

SEQ ID NO: 467 - protein, 70 aa, Phleum pratense
IDAHSMCSPGFSCDSAYQVTYIVRGSGRVQVVGPDGKRVLETRIEGGSLFIVPRFHVVSKIADASGMEWF

SEQ ID NO: 468 - protein, 48 aa, Phleum pratense
PPRSCRGRCPCSLRTPAWGSCSRMAPCNCRCPCSTRGARRRLPGRTSS

SEQ ID NO: 469 - protein, 121 aa, Phleum pratense
ATSPTTRTTAPTSRRSPSAPSPHTSPPPRASATTSSRDGTTRTCISTRRIPSRPTTSPWSTCRAARSPTPSATSASREPTPRPSRSSATSSRRSLDRREIWLSEMVAWVGLQLAFWIQWQH

SEQ ID NO: 470 - protein, 119 aa, Phleum pratense
SPTTRTTAPTSRRSPSAPSPHTSPPPRASATTSSRDGTTRTCISTRRIPSRPTTSPWSTCRAARSPTPSATSASREPTPRPSRSSDTSSRRSLDRREIWLSEMVAWVGLQLAFWIQWQH

SEQ ID NO: 471 - protein, 56 aa, Phleum pratense
SSCSRRCPWRPPRRWSCCPLPWPGTRRWWFRCHQPPSSRTAPGSSRSLYGSPSTSC

SEQ ID NO: 472 - protein, 56 aa, Phleum pratense; identical to SEQ ID NO: 471

SEQ ID NO: 473 - protein, 94 aa, Phleum pratense
VKVAPAALVNVLEARSALTISVLRISSMPFSVYHSGKSFSPPLPTQVWNPGSLAAFWGKRYPLLSAGRSYGATDSLEMMASSPGWTPCLANSLA

SEQ ID NO: 474 - protein, 44 aa, Phleum pratense
SSPSCAPESTHAVRALPSTHTARILLRSTTANVSGCKDRYERPS

SEQ ID NO: 475 - protein, 77 aa, Phleum pratense
QVQVPGGHQGDLPRGEGVQPQLPGAAGEVCRRRRRRGGGGHQGEGQGQVDRAQGVVGSHLEDRHSRQAHRPLHRPLH

SEQ ID NO: 476 - protein, 597 aa, Phleum pratense
FAAISNAKHLIYVTGWSVYTEITLLRDANRPKPAGGTVTLGELLKKKASEGVRVLMLVWDDRTSVGVLKKDGLMATHDEETMNYFQDTDVHCVLCPRDPDDSGSIVQDLQISTMFTHHQKIVVVDHDMPQPQSASRRRRIMSFVGGLDLCDGRYDTPFHSVFGTLDGAHHDDFHQPNFATSAITKGGPREPWHDIHCRLEGPVAWDVLYNFEQRWRKQGGKDLLIQLRDLADEIIPPSPVVYAEDREAWNVQLFRSIDGGAAFGFPDTPEDAARAGLVSGKDQIIDRSIQDAYICTIRRAKSFIYIENQYFLGSSYCWKPDGIKPDDVGALHLIPKELSMKVVSKIEAGERFTVYVVVPMWPEGIPASGSVQAILDWQRRTMEMMYTDIAQAIQAKGIDANPKDYLTFFCLGNREAKKAGEYEPPEPAEPDSDYLKAQQNRRFMIYVHTKMMIVDDEYIIVGSANINQRSMDGARDSEIAMGAYQPYHLAASRPARGQVHGFRMALWYEHLGMVDEAFQRPESVECVRKVNAMADRYWNLYAGDGPERDLPGHLLTYPVGVTSDGTVTQLPGVEFFPDTQARILGAKSDYLPPILTT

SEQ ID NO: 477 - protein, 424 aa, Phleum pratense
HQPNFATAAITKGGPREPWHDIHCRLEGPVAWDVLYNFEQRWRKQGGKDLLIQLRDLADEIIPPSPVVYAEDREAWNVQLFRSIDGGAAFGFPDTPEDAARAGLVSGKDQIIDRSIQDAYICAIRRAKSFIYIENQYFLGSSYCWKPDGIKPDDVGALHLIPKELSMKVVSKIEAGERFTVYVVVPMWPEGIPASGSVQAILDWQRRTMEMMYTDIAQAIQAKGIDANPKDYLTFFCLGNREAKKAGEYEPPEPAEPDSDYLKAQQNRRFMIYVHTKMMIVDDEYIIVGSANINQRSMDGARDSEIAMGAYQPYHLAASRPARGQVHGFRMALWYEHLGMVDEAFQRPESVECVRKVNAMADRYWNLYAGDGPERDLPGHLLTYPVGVTSDGTVTQLPGVEFFPDTQARILGAKSDYLPPILTT

SEQ ID NO: 478 - protein, 466 aa, Phleum pratense
QSASRRRRIMSFVGGLDLCDGRYDTPFHSVFGTLDGAHHDDFHQPNFATSAITKGGPREPWHDIHCRLEGPVAWDVLYNFEQRWRKQGGKDLLIQLRDLADEIIPPSPVVYAEDREAWNVQLFRSIDGGAAFGFPDTPEDAARAGLVSGKDQIIDRSIQDAYICAIRRAKSFIYIENQYFLGSSYCWKPDGIKPDDVGALHLIPKELSMKVVSKIEAGERFTVYVVVPMWPEGIPASGSVQAILDWQRRTMEMMYTDIAQAIQAKGIDANPKDYLTFFCLGNREAKKAGEYEPPEPAEPDSDYLKAQQNRRFMIYVHTKMMIVDDEYIIVGSANINQRSMDGARDSEIAMGAYQPYHLAASRPARGQVHGFRMALWYEHLGMVDEAFQRPESVECVRKVNAMADRYWNLYAGDGPERDLPGHLLTYPVGVTSDGTVTQLPGVEFFPDTQARILGAKSDYLPPILTT

SEQ ID NO: 479 - protein, 549 aa, Phleum pratense
SEGVRVLMLVWDDRTSVGVLKKDGLMATHDEETMNYFQDTDVHCVLCPRDPDDSGSIVQDLQISTMFTHHQKIVVVDHDMPQPQSASRRRRIMSFVGGLDLCDGRYDTPFHSVFGTLDGAHHDDFHQPNFATAAITKGGPREPWHDIHCRLEGPVAWDVLYNFEQRWRKQGGKDLLIQLRDLADEIIPPSPVLYAEDRETWNVQLFRSIDGGAAFGFPDTPEDAARAGLVSGKDQIIDRSIQDAYICAIRRAKSFIYIENQYFLGSSYCWKPDGIKPDDVGALHLIPKELSMKVVSKIEAGERFTVYVVVPMWPEGIPASGSVQAILDWQRRTMEMMYTDIAQAIQAKGIDANPKDYLTFFCLGNREAKKAGEYEPPEPAEPDSDYLKAQQNRRFMIYVHTKMMIVDDEYIIVGSANINQRSMDGARDSEIAMGAYQPYHLAASRPARGQVHGFRMALWYEHLGMVDEAFQRPESVECVRKVNAMADRYWNLYAGDGPERDLPGHLLTYPVGVTSDGTVTQLPGVEFFPDTQARILGAKSDYLPPILTT

SEQ ID NO: 480 - protein, 384 aa, Phleum pratense
TDVHCVLCPRDPDDSGSIVQDLQISTMFTHHQKIVVVDHDMPQPQSASRRRRIMSFVGGLDLCDGRYDTPFHSVFGTLDGAHHDDFHQPNFATAAITKGGPREPWHDIHCRLEGPVAWDVLYNFEQRWRKQGGKDLLIQLRDLADEIIPPSPVVYAEDREAWNVQLFRSIDGGAAFGFPDTPEDAARAGLVSGKDQIIDRSIQDAYICAIRRAKSFIYIENQYFLGSSYCWKPDGIKPDDVGALHLIPKELSMKVVSKIEAGERFTVYVVVPMWPEGIPASGSVQAILDWQRRTMEMMYTDIAQAIQAKGIDANPKDYLTFFCLGNREAKKAGEYEPPEPAEPDSDYLKAQQNRRFMIYVHTKMMIVDDEYIIVGSANINQRSM

SEQ ID NO: 481 - protein, 634 aa, Phleum pratense
PLLEGSGKLEVWCVDGSAKTALPKEDLGKFHSGDCYIVLYTYHSGEKREEFYLTYWIGKDSVLEDQHMALQIATTIWNSMKGRPVLGRIYQGKEPPQFIALFQPMVILKGGISSGYKKSIEENGLKDETYSGTGIALVHIHGTSIHNNKTLQVDAVSISLSSTDCFVLQSGNSMFTWIGNTSSYEQQQWAAKVAEFLKPGASVKHCKEGTESSAFWSALGGKQNYTSKNATQDVLREPHLYTFSFRNGKLEVTEVFNFSQDDLLTEDVMILDTHAEVFVWMGQCVDTKEKQTAFETGQKYVEHAVNFEGLSPDVPLYKVSEGNEPCFFRTYFSWDNTRSVIHGNSFQKKLSLLFGMRSESGSKGSGDGGPTQRASALAALSSAFNPSSQDKQSNDRPKSSGDGGPTQRASALAALSSSLNPSSKPKSPHSQSRSGQGSQRAAAVAALSNVLTAEGSTLSPRNDAEKTELAPSEFHTDQDAPGDEVPSEGERTEPDVSQEETANENGGETTFSYDRLISKSTDPVRGIDYKRRETYLSDSEFETVFGVTKGGILPAAKVEARIAEKKSRSFLKHSLLRTQRLHKFLVCSSMIGVMAHQKPMSGNLVMFQMQDHQLIYPLISPSFLVYSFFVHDLR

SEQ ID NO: 482 - protein, 571 aa, Phleum pratense
PPLLEGSGKLEVWCVDGSAKTALPKEDLGKFHSGDCYIVLYTYHSGEKREEFYLTYWIGKDSVLEDQHMALQIATTIWNSMKGRPVLGRIYQGKEPPQFIALFQPMVILKGGISSGYKKSIEENGLKDETYSGTGIALVHIHGTSIHNNKTLQVDAVSISLSSTDCFVLQSGNSMFTWIGNTSSYEQQQWAAKVAEFLKPGASVKHCKEGTESSAFWSALGGKQNYTSKNATQDVLREPHLYTFSFRNGKLEVTEVFNFSQDDLLTEDVMILDTHAEVFVWMGQCVDTKEKQTAFETGQKYVEHAVNFEGLSPDVPLYKVSEGNEPCFFRTYFSWDNTRSVIHGNSFQKKLSLLFGMRSESGSKGSGDGGPTQRASALAALSSAFNPSSQDKQSNDRPKSSGDGGPTQRASALAALSSSLNPSSKPKSPHSQSRSGQGSQRAAAVAALSNVLTAEGSTLSPRNDAEKTELAPSEFHTDQDAPGDEVPSEGERTEPDVSQEETANENGGETTFSYDRLISKSTDPVRGIDYKRRETYLSDSEFETVFGVTKEEFYQQPRWKQELQKRKADLF

SEQ ID NO: 483 - protein, 663 aa, Phleum pratense
VGRVTQVDDRKAASAAVEEFIVKQNRPKTTRVTQVIQGYENHTFKSLFESWPVSSTGNASTEEGRGKVAALLKKKGDVKGASKNSTPVNEEVPPLLEGSGKLEVWCVDGSAKTALPKEDLGKFHSGDCYIVLYTYHSGEKREEFYLTYWIGKDSVLEDQHMALQIATTIWNSMKGRPVLGRIYQGKEPPQFIALFQPMVILKGGISSGYKKSIEENGLKDETYSGTGIALVHIHGTSIHNNKTLQVDAVSISLSSTDCFVLQSGNSMFTWIGNTSSYEQQQWAAKVAEFLKPGASVKHCKEGTESSAFWSALGGKQNYTSKNATQDVLREPHLYTFSFRNGKLEVTEVFNFSQDDLLTEDVMILDTHAEVFVWMGQCVDTKEKQTAFETGQKYVEHAVNFEGLSPDVPLYKVSEGNEPCFFRTYFSWDNTRSVIHGNSFQKKLSLLFGMRSESGSKGSGDGGPTQRASALAALSSAFNPSSQDKQSNDRPKSSGDGGPTQRASALAALSSSLNPSSKPKSPHSQSRSGQGSQRAAAVAALSNVLTAEGSTLSPRNDAEKTELAPSEFHTDQDAPGDEVPSEGERTEPDVSQEETANENGGETTFSYDRLISKSTDPVRGIDYKRRETYLSDSEFETVFGVTKEEFYQQPRWKQELQKRKADLF

SEQ ID NO: 484 - protein, 663 aa, Phleum pratense; identical to SEQ ID NO: 483

SEQ ID NO: 485 - protein, 43 aa, Phleum pratense
DYKRRETYLSDSEFQTVFGVTKEEFYQQPRWKQELQKRKADLF

SEQ ID NO: 486 - protein, 508 aa, Phleum pratense
LEDQHMALQIATTIWNSMKGRPVLGRIYQGKEPPQFIGLFQPMVILKGGISSGYKKSIEENGLKDETYSGTGIALVHIHGTSIHNNKTLQVDAVSISLSSTDCFVLQSGNSMFTWIGNTSSYEQQQWAAKVAEFLKPGASVKHCKEGTESSAFWSALGGKQNYTSKNATQDVLREPHLYTFSFRNGKLEVTEVFNFSQDDLLTEDVMILDTHAEVFVWMGQCVDTKEKQTAFETGQKYVEHAVNFEGLSPDVPLYKVSEGNEPCFFRTYFSWDNTRSVIHGNSFQKKLSLLFGMRSESGSKGSGDGGPTQRASALAALSSAFNPSSQDKQSNDRPKSSGDGGPTQRASALAALSSSLNPSSKPKSPHSQSRSGQGSQRAAAVAALSNVLTAEGSTLSPRNDAEKTELAPSEFHTDQDAPGDEVPSEGERTEPDVSQEETANENGGETTFSYDRLISKSTDPVRGIDYKRRETYLSDSEFETVFGVTKEEFYQQPRWKQELQKRKADLF

SEQ ID NO: 487 - protein, 43 aa, Phleum pratense
ITNAERLIYQTANSRLCSVLPKEEFYQQPRWKQELQKRKADLF

SEQ ID NO: 488 - protein, 24 aa, Phleum pratense
ATGAAAAMTTTIRSTATARPRAIV

SEQ ID NO: 489 - protein, 107 aa, Phleum pratense
RVRREYKANEISEEAYVSAIKEEISKVVKIQEELDIDVLVHGEPERNDMVEYFGEQLSGFAFTANGWVQSYGSRCVKPPIIYGDVSRPNPMTVFWSKMAQSMTPRPM

SEQ ID NO: 490 - protein, 191 aa, Phleum pratense
IAIAFLSVSNNYEYILSDKLVVSTSCSLMHTAVDLVNETKLDSEIKSWLAFAAQKVVEVNALGKALVGLKDEAYFAANAAAQASRRSSPRVNNEEVQKAAAALKGSDHRRATTVSARLDAQQKKLNLPVLPTTTIGSFPQTMDLRRVRREYKAKKISEEAYVSAIKEEISKVVKIQEELDIDVLVHGEPER

SEQ ID NO: 491 - protein, 268 aa, Phleum pratense
YLFAGVVDGRNIWADDLAASLSTLESLEAIVGKDKLVVSTSCSLMHTAVDLVNETKLDSEIKSWLAFAAQKVVEVNALGKALVGLKDEAYFAANAAAQASRRSSPRVNNEEVQKAAAALKGSDHRRATTVSARLDAQQKKLNLPVLPTTTIGSFPQTMDLRRVRREYKAKKISEEAYVSAIKEEISKVVKIQEELDIDVLVHGEPERNDMVEYFGEQLSGFAFTANGWVQSYGSRCVKPPIIYGDVSRPNPMTVFWSKMAQSMTPRPM

SEQ ID NO: 492 - protein, 230 aa, Phleum pratense
KVRSKILSEEFGWDKDLAKKIWCFGPETTGPNMVVDMCKGVQYLNEIKDSVVAGFQWASKEGALADENMRGICFEVCDVVLHTDAIHRGGGQVIPTARRVIFASQLTAKPRLLEPVYLVEIQAPEGALGGIYGVLNQKRGHVFEEMQRPGTPLYNIKAYLPVIESFGFSATLRAATSGQAFPQCVFDHWDVMNSDPLEVDSQSFNLVKEIRKRKGLKEQMTPLSDFEDKL

SEQ ID NO: 493 - protein, 185 aa, Phleum pratense
EIKDSVVAGFQWASKEGALADENMRGICFEVCDVVLHTDAIHRGGGQVIPTARRVIFASQLTAKPRLLEPVYLVEIQAPEGALGGIYGVLNQKRGHVFEEMQRPGTPLYNIKAYLPVIESFGFSATLRAATSGQAFPQCVFDHWDVMNSDPLEVDSQSFNLVKEIRKRKGLKEQMTPLSDFEDKL

SEQ ID NO: 494 - protein, 344 aa, Phleum pratense
NQPKLVEGLKRLAKSDPMVLCSIEESGEHIIAGAGELHLEICLKDLQDDFMGGAEIIVSPPVVSFRETVLDKSCRTVMSKSPNKHNRLYMEARPLEEGLPEAIDEGRIGPRDDPKVRSKILSEEFGWDKDLAKKIWCFGPETTGPNMVVDMCKGVQYLNEIKDSVVAGFQWASKEGALADENMRGICFEVCDVVLHTDAIHRGGGQVIPTARRVIFASQLTAKPRLLEPVYLVEIQAPEGALGGIYGVLNQKRGHVFEEMQRPGTPLYNIKAYLPVIESFGFSATLRAATSGQAFPQCVFDHWDVMNSDPLEVDSQSFNLVKEIRKRKGLKEQMTPLSDFEDKL

SEQ ID NO: 495 - protein, 237 aa, Phleum pratense
IGPRDDPKVRSKILSEEFGWDKDLAKKIWCFGPETTGPNMVVDMCKGVQYLNEIKDSVVAGFQWASKEGALADENMRGICFEVCDVVLHTDAIHRGGGQVIPTARRVIFASQLTAKPRLLEPVYLVEIQAPEGALGGIYGVLNQKRGHVFEEMQRPGTPLYNIKAYLPVIESFGFSATLRAATSGQAFPQCVFDHWDVMNSDPLEVDSQSFNLVKEIRKRKGLKEQMTPLSDFEDKL

SEQ ID NO: 496 - protein, 238 aa, Phleum pratense
RIGPRDDPKVRSKILSEEFGWDKDLAKKIWCFGPETTGPNMVVDMCKGVQYLNEIKDSVVAGFQWASKEGALADENMRGICFEVCDVVLHTDAIHRGGGQVIPTARRVIFASQLTAKPRLLEPVYLVEIQAPEGALGGIYGVLNQKRGHVFEEMQRPGTPLYNIKAYLPVIESFGFSATLRAATSGQAFPQCVFDHWDVMNSDPLEVDSQSFNLVKEIRKRKGLKEQMTPLSDFEDKL

SEQ ID NO: 497 - protein, 238 aa, Phleum pratense
RIGPRDDPKVRSKILSEEFGWDKDLAKKIWCFGPETTGPNMVVDMCKGVQYLNEIKDSVVAGFQWASKEGALADENMRGICFEVCDVVLHTDAIHRGGGQVIPTARRVIFASQLTAKPRLLEPVYLVEIQAPEGALGGIYGVLNQKRGHVFEEMQRPGTPLYNIKAYLPVIESFGFSATLRAATSGQAFPQCVFDHWDVMNSDPLEVDSQSANLVKEIRKRKGLKEQMTPLSDFEDKL

SEQ ID NO: 498 - protein, 204 aa, Phleum pratense
ETTGPNMVVDMCKGVQYLNEIKDSVVAGFQWASKEGALADENMRGICFEVCDVVLHTDAIHRGGGQVIPTARRVIFASQLTAKPRLLEPVYLVEIQAPEGALGGIYGVLNQKRGHVFEEMQRPGTPLYNIKAYLPVIESFGFSATLRAATSGQAFPQCVFDHWDVMNSDPLEVDSQSSNLVKEIRKRKGLKEQMTPLSDFEDKL

SEQ ID NO: 499 - protein, 473 aa, Phleum pratense
DPEGPLMLYVSKMIPASDKGRFFAFGRVFAGRVATGMKVRIMGPNFVPGQKKDLYTKSVQRTVIWMGKKQESVEDVPCGNTVALVGLDQFITKNATLTGEKEVDACPIRAMKFSVSPVVRVAVQCKVASDLPKLVEGLKRLAKSDPMVLCSIEESGEHIIAGAGELHLEICLKDLQDDFMGGAEIIVSPPVVSFRETVLDKSCRTVMSKSPNKHNRLYMEARPLEEGLPEAIDEGRIGPRDDPKVRSKILSEEFGWDKDLAKKIWCFGPETTGPNMVVDMCKGVQYLNEIKDSVVAGFQWASKEGALADENMRGICFEVCDVVLHTDAIHRGGGQVIPTARRVIFASQLTAKPRLLEPVYLVEIQAPEGALGGIYGVLNQKRGHVFEEMQRPGTPLYNIKAYLPVIESFGFSATLRAATSGQAFPQCVFDHWDVMNSDPLEVDSQSFNLVKEIRKRKGLKEQMTPLSDFEDKL

SEQ ID NO: 500 - protein, 455 aa, Phleum pratense
DPEGPLMLYVSKMIPASDKGRFFAFGRVFAGRVATGMKVRIMGPNFVPGQKKDLYTKSVQRTVIWMGKKQESVEDVPCGNTVALVGLDQFITKNATLTGEKEVDACPIRAMKFSVSPVVRVAVQCKVASDLPKLVEGLKRLAKSDPMVLCSIEESGEHIIAGAGELHLEICLKDLQDDFMGGAEIIVSPPVVSFRETVLDKSCRTVMSKSPNKHNRLYMEARPLEEGLPEAIDEGRIGPRDDPKVRSKILSEEFGWDKDLAKKIWCFGPETTGPNMVVDMCKGVQYLNEIKDSVVAGFQWASKEGALADENMRGICFEVCDVVLHTDAIHRGGGQVIPTARRVIFASQLTAKPRLLEPVYLVEIQAPEGALGGIYGVLNQKRGHVFEEMQRPGTPLYNIKAYLPVIESFGFSATLRAATSGQAFPQCVFDHWDVMNSDPLEADSQSANLVKEIRK

SEQ ID NO: 501 - protein, 178 aa, Phleum pratense
AGFQWASKEGALADENMRGICFEVCDVVLHTDAIHRGGGQVIPTARRVIFASQLTAKPRLLEPVYLVEIQAPEGALGGIYGVLNQKRGHVFEEMQRPGTPLYNIKAYLPVIESFGFSATLRAATSGQAFPQCVFDHWDVMNSDPLEADSQSANLVKEIRKRKGLKEQMTPLSDFEDKL

SEQ ID NO: 502 - protein, 114 aa, Phleum pratense
RHLARQFIPHLHQRFIHPPIHQPNTMENLSSTIFSFVILLSASASLVVAGDPIKEACGGTRFPETCASVLSANKDPRSTYADPGELAEMEVSAAFHLFSMAVTTTRSQQWNDEN

SEQ ID NO: 503 - protein, 92 aa, Phleum pratense
RHLARQFIPHLHQRFIHPPIHQPNTMENLSSTIFSFVILLSASASLVVAGDPIKEACGGTRFPETCASVLSANKDPRSTYADPVELAEMEVS

SEQ ID NO: 504 - protein, 55 aa, Phleum pratense
PNTMENLSSTIFSFVILLSASASLVVAGDPIKEACRGTRFPETCASVLSANKDPR

SEQ ID NO: 505 - protein, 44 aa, Phleum pratense
YYGKINLSKVRTFLTEAKAKHIEWNCDVCRRGDDKKKVDEISKG

SEQ ID NO: 506 - protein, 76 aa, Phleum pratense
PHVARIRPHLHQRFIHPPIHQPNTMENLSSTIFSFVILLSASASLVVAGDPIKEACGGTRFPETCASVLSANKDPR

SEQ ID NO: 507 - protein, 57 aa, Phleum pratense
MENLSSTIFSFVILLSASASLVVAGDPIKEACGGTRFPETCASVLSANKDPRSAYVD

SEQ ID NO: 508 - protein, 58 aa, Phleum pratense
MENLSSTIFSFVILLSASASLVVAGDPIKEACGGTRFPETCASVLSANKDPRSTYADP

SEQ ID NO: 509 - protein, 54 aa, Phleum pratense
FTPHSLKLHKACEAFNPYDGKISLSKVRSFLTEAKAKHIEWNCDVCRHGDDKKK

SEQ ID NO: 510 - protein, 69 aa, Phleum pratense
QQWNDENMSKEDEDCFKECGVKLHKACEAFNPYDGKISLSKVRSFLTEAKAKHIEWNCDVCRHGDDKKK

SEQ ID NO: 511 - protein, 55 aa, Phleum pratense
FTPHSLKLHKACEAFDPYYGKISLSKVRSFLTEAKAKHIEWNCDVCRHGDDKKKV

SEQ ID NO: 512 - protein, 70 aa, Phleum pratense
QQWNDENMSKEDEDCFKECGVKLHKACEAFDPYYGKISLSKVRSFLTEAKAKHIEWNCDVCRHGDDKKKV

SEQ ID NO: 513 - protein, 91 aa, Phleum pratense
NTMENLSSTIFSFVILLSASASLVVAGDQIKEACGGTRFPETCASVLSANKDPRSTYADPVELAEMEVSAAFHLFSMAVTAARSQQWNDEN

SEQ ID NO: 514 - protein, 72 aa, Phleum pratense
SQQWNDENMSKEDEDCFKECGVKLHKACEAFDPYDGKISLSKVRSFLTEAKAKHIEWNCDVCRHGDDKKKVD

SEQ ID NO: 515 - protein, 89 aa, Phleum pratense
MENLSSTIFSFVILLSASASLVVAGDPIKEACGGTRFPETCASVLSANKDPRSTYADPVELAEMEVSAAFHLFSMAVTAARSQQWNDEN

SEQ ID NO: 516 - protein, 62 aa, Phleum pratense
QQWNDENMSKEDEDCFKECGVKLHKACEAFNPYDGKISLSKVRSFLAEAKAKHIEWNCDVCR

SEQ ID NO: 517 - protein, 92 aa, Phleum pratense
LLSASASLVVAGDPIKEACGGTRFPETCASVLSANKDPRSTYADPGELAEMECGTDFHLFSMTVTAAGSQQWNDENMSKEDEDCFKECGVKL

SEQ ID NO: 518 - protein, 77 aa, Phleum pratense
GSQQWNDENMSKEDEDCFKECGVKLHKACDAFNPYYGKTNLSKVRTFLTEAKAKHIEWNCDVCRHGDDKKTVDEISK

SEQ ID NO: 519 - protein, 66 aa, Phleum pratense
DGGREILHQPNTMENLSSTIFSFVILLSASASLVVAGDPIKEACGGTRYPETCVSVLSANKDPRST

SEQ ID NO: 520 - protein, 112 aa, Phleum pratense
IKEACGGTRFPETCASVLSANKDPRSTYADPVELAEMEVSAAFHLFSMAVTAARSQQWNDENMSKEKRWNAALTSISASSTGSAYVDLGSLLAERTEACASGKRVPPHASLI

SEQ ID NO: 521 - protein, 83 aa, Phleum pratense
IKEACGGTRFPETCASVLSANKDPRSTYADPVELAEMEVSAAFHLFSMAVTAARSQQWNDENMSKEDEDCFKECGVKLHTLDR

SEQ ID NO: 522 - protein, 87 aa, Phleum pratense
IKEACGGTRFPETCASVLSANKDPRSTYADPVELAEMEVSAAFHLFSMAVTAARSQQWNDENMSKEDEDCFKECGVKLHKACEAFNP

SEQ ID NO: 523 - protein, 51 aa, Phleum pratense
STIFSFVILLSASASLVVAGDPIKEACGGPRFPETCASVLSANKDPRSTYA

SEQ ID NO: 524 - protein, 78 aa, Phleum pratense
IKEACGGTRFPETCASVLSANKDPRSTYADPVELAEMEVSAAFHLFSMAVTAARSQQWNDENMSKEDEDCFKECGVKL

SEQ ID NO: 525 - protein, 87 aa, Phleum pratense
IKEACGGTRFPETCASVLSANKDPRSTYADPVELAEMEVSAAFHLFSMAVTAARSQQWNDENMSKEDEDCFKECGMKLHKACEAFNP

SEQ ID NO: 526 - protein, 82 aa, Phleum pratense
IKEACGGTRFPETCASVLSANKDPRSTYADPVELAEMEVSAAFHLFSMAVTAARSQQWNDENMSKEDEDCFKECGLNASHAL

SEQ ID NO: 527 - protein, 65 aa, Phleum pratense
RAAVTTMENLSSTIFSFVILLSASASLVVAGDPIKEACGGTRFPETCASVLSANKDPRSAYVDLG

SEQ ID NO: 528 - protein, 76 aa, Phleum pratense
VKLKNVLNVYEARLTKFKYLAGDYLSLADLNHVSTTLCLGATPHASLFDAYPHVKAWWTDLLAKPSVQKVAALMKP

SEQ ID NO: 529 - protein, 81 aa, Phleum pratense
VEDNLVKLKNVLNVYEARLTKSKYLAGDYLSLADLNHVSTTLCLGATPHASLFDAYPHVKAWWTDLLAKPSVQKVAALMKP

SEQ ID NO: 530 - protein, 70 aa, Phleum pratense
LKKVLEVYEARLTKFKYLAGDYLSLADLNHVSTTLCLGATPHASLFDAYPHVKAWWTDLLAKPSVQKVAA

SEQ ID NO: 531 - protein, 48 aa, Phleum pratense
DLNHVSTTLCLGATPHASLFDAYPHVKAWWTDLLAKPSVQKVAALMKP

SEQ ID NO: 532 - protein, 79 aa, Phleum pratense
DNLVKLKNVLNVYEARLTKSKYLAGDYLSLADLNHVSTTLCLGATPHASLFDAYPHVKAWWTDLLAKPSVQKVAALMKP

SEQ ID NO: 533 - protein, 73 aa, Phleum pratense
KKVLEVYEARLTKFKYLAGDYLSLADLNHVSTTLCLGATPHASLFDAYPHVKAWWTDLLAKPSVQKVAALMKP

SEQ ID NO: 534 - protein, 108 aa, Phleum pratense
QYTAALSPILFECLIHPMLGGATNQKVVEDNLVKLKNVLNVYEARLTKSKYLAGDYLSLADLNHVSTTLCLGATPHASLFDAYPHVKAWWTDLLAKPSVQKVAALMKP

SEQ ID NO: 535 - protein, 108 aa, Phleum pratense
QYTAALSPILFECLIHPMLGGATNQKVIEDNLVKLKNVLNVYEARLTKSKYLAGDYLSLADLNHVSTTLCLGATPHASLFDAYPHVKAWWTDLLAKPSVQKVAALMKP

SEQ ID NO: 536 - protein, 108 aa, Phleum pratense
QYTAALSPILFECLIHPMLGGATNQKVVEDNLVKLKNVLNVYEARLTKFKYLAGDYLSLADLNHVSTTLCLGATPHASLFDAYPHVKAWWTDLLAKPSVQKVAALMKP

SEQ ID NO: 537 - protein, 83 aa, Phleum pratense
AALEEAGVDYEIVPINFGTGEHKAPDHLARNPFGQVPALQDGDLCIFESRAICKYACRKNKPELLKEGDLKEAAMDEALEENG

SEQ ID NO: 538 - protein, 62 aa, Phleum pratense
DHLARNPFGQVPALQDGDLCIFESRAICKYACRKNKPELLKEGDLKESAMVDVWLEVEANQY

SEQ ID NO: 539 - protein, 166 aa, Phleum pratense
CIPYRESAGGEVEVLVISSRKKGASAGVLFPKGGWELDETMEEAARREALEEAGVDYEIVPINFGTGEHKGPDHLARNPFGQVPALQDGDLCIFESRAICKYACRKNKPELLKEGDLKESAMVDVWLEVEAQQYTAALSPILFECLVHPMLGGATDQKVVEDNLLQ

SEQ ID NO: 540 - protein, 21 aa, Phleum pratense
KLRFTCLSSTGSSCLFVLILF

SEQ ID NO: 541 - protein, 79 aa, Phleum pratense
EKLKKVLEVYEARLSKHSYLAGDFVSFADLNHFPKTFYFMATPHASLFDSYPHVKAWWERIMARPAVKKIAAAMVPPKA

SEQ ID NO: 542 - protein, 46 aa, Phleum pratense
PDHLARNPFGQVPALQDGDLYIFESRAICKYACRKNKPELLKEGDL

SEQ ID NO: 543 - protein, 95 aa, Phleum pratense
LEEAGVDYEIVPINFGTGEHKGPDHLARNPFGQVPALQDGDLYIFESRAICKYACRKNKPELLKEGDLKEAAMVDVWLEVEANQYTAALGPILFE

SEQ ID NO: 544 - protein, 164 aa, Phleum pratense
PAPRRLFKPGPPASSSPSHPIHPAATSLPPPRKRKVRGFWRVHQISARMAPVKLYGATLSWNVTRCVAALEEAGVDYEIVPINFGTGEHKGPDHLARNPFGQVPALQDGDLYIFESRAICKYACRKNKPELLKEGDLKESAMVDVWLEVEANQYTAALGPILFE

SEQ ID NO: 545 - protein, 419 aa, Phleum pratense
RLKKLKSEHGKVQLGNITVDMVLGGMRGMTGMLWETSLLDPEEGIRFRGLSIPECQKVLPTAVKGGEPLPEGLLWLLLTGKVPTKEQVDALSKDLLSRSTVPGYVYKAIDALPVTAHPMTQFTTGVMALQVESEFAKAYDKGMPKSKFWEPTYEDCLNLIARLPQVASYVYRRIFKDGKTIAADNSLDYAANFSHMLGFDDPKMLELMRLYITIHTDHEGGNVSAHTGHLVGSALSDPYLSFAAALNGLAGPLHGLANQEVLLWIKSVMEETGSNITTDQLKEYVWKTLKSGKVVPGYGHGVLRNTDPRYSCQREFALKHLPEDPLFQLVSKLYEVVPGILTELGKVKNPWPNVDAHSGVLLNHFGLVEARYDTVLFGVSRSMGIGSQLIWDRALGLPLERPKSVTMEWLENHCKKVAA

SEQ ID NO: 546 - protein, 419 aa, Phleum pratense
RLKKLKSEHGKVQLGNITVDMVLGGMRGMTGMLWETSLLDPEEGIRFRGLSIPECQKVLPTAVKGGEPLPEGLLWLLLTGKVPTKEQVDALSKDLLSRSTVPGYVYKAIDALPVTAHPMTQFTTGVMALQVESEFAKAYDKGMPKSKFWEPTYEDCLNLIARLPQVASYVYRRIFKDGKTIAADNSLDYAANFSHMLGFDDPKMLELMRLYITIHTDHEGGNVSAHTGHLVGSALSDPYLSFAAALNGLAGPLHGLANQEVLLWIKSVMEETGSNITTDQLKEYVWKTLKSGKVVPGYGHGALRDTDPRYSCQREFALKHLPEDPLFQLVSKLYEVVPGILTELGKVKNPWPNVDAHSGVLLNHFGLVEARYHTVLFGVSRSMGIGSQLIWDRALGLPLERPKSVTMEWLGNHCKKVAA

SEQ ID NO: 547 - protein, 445 aa, Phleum pratense
AYFEACSLFLNYAVSFNYFVCNLLQERLKKLKSEHGKVQLGNITVDMVLGGMRGMTGMLWETSLLDPEEGIRFRGLSIPECQKVLPTAVKGGEPLPEGLLWLLLTGKVPTKEQVDALSKDLLSRSTVPGYVYKAIDALPVTAHPMTQFTTGVMALQVESEFAKAYDKGMPKSKFWEPTYEDCLNLIARLPQVASYVYRRIFKDGKTIAADNSLDYAANFSHMLGFDDPKMLELMRLYITIHTDHEGGNVSAHTGHLVGSALSDPYLSFAAALNGLAGPLHGLANQEVLLWIKSVMEETGSNITTDQLKEYVWKTLKSGKVVPGYGHGALRDTDPRYSCQREFALKHLPEDPLFQLVSKLYEVVPGILTELGKVKNPWPNVDAHSGVLLNHFGLVEARYDTVLFGVSRSMGIGSQLIWDRALGLPLERPKSVTMEWLENHCKKVAA

SEQ ID NO: 548 - protein, 444 aa, Phleum pratense
AYFEACSLFLNYAVSFNYFVCNLLQERLKKLKSEHGKVQLGNITVDMVLGGMRGMTGMLWETSLLDPEEGIRFRGLSIPECQKVLPTAVKGGEPLPEGLLWLLLTGKVPTKEQVDALSKDLLSRSTVPGYVYKAIDALPVTAHPMTQFTTGVMALQVESEFAKAYDKGMPKSKFWEPTYEDCLNLIARLPQVASYVYRRIFKDGKTIAADNSLDYAANFSHMLGFDDPKMLELMRLYITIHTDHEGGNVSAHTGHLVGSALSDPYLSFAAALNGLAGPLHGLANQEVLLWIKSVMEETGSNITTDQLKEYVWKTLKSGKVVPGYGHGALRDTDPRYSCQREFALKHLPEDPLFQLVSKLYEVVPGILTELGKVKNPWPNVDAHSGVLLNHFGLVEARYDTVLFGVSRSMGIGSQLIWDRALGLPLERPKSVTMEWLGNHCKKGA

SEQ ID NO: 549 - protein, 89 aa, Phleum pratense
VSKLYEVVPGILTELGKVKNPWPNVDAHSGVLLNHFGLVEARYDTVLFGVSRSMGIGSQLIWDRALGLPLERPKSVTMEWLGNHCKKGA

SEQ ID NO: 550 - protein, 114 aa, Phleum pratense
TDPRYSCQREFALKHLPEDPLFQLVSKLYEVVPGILTELGKVKNPWPNVDAHSGVLLNHFGLVEARYSTVLFGVSRSMGIGSQLIWDRALGLPLERPKSVTMEWLENHCKKVAA

SEQ ID NO: 551 - protein, 90 aa, Phleum pratense
VSKLYEVVPGILTELGKVKNPWPNVDAHSGVLLNHFGLVEARYSTVLFGVSRSMGIGSQLIWDRALGLPLERPKSVTMEWLENHCKKVAA

SEQ ID NO: 552 - protein, 90 aa, Phleum pratense; identical to SEQ ID NO: 551

SEQ ID NO: 553 - protein, 114 aa, Phleum pratense
TDPRYSCQREFALKHLPEDPLFQLVSKLYEVVPGILTELGKVKNPWPNVDAHSGVLLNHFGLVEARYCTVLFGVSRSMGIGSQLIWDRALGLPLERPKSVTMEWLENHCKKVAA

SEQ ID NO: 554 - protein, 89 aa, Phleum pratense
EDPLFQLVSKLYEVVPGILTELGKVKNPWPNVDAHSGVLLNHFGLVEARYCTVLFGVSRSMGIGSQLIWDRALGLPLERPKSVTMEWLG

SEQ ID NO: 555 - protein, 215 aa, Phleum pratense
PRPMKGMLTGPVTILNWSFVRNDQPRFETCYQIALAIKKEVEDLEAGGIQVIQIDEAALREGLPLRKSEHAFYLDWAVHSFRITNCGVQDTTQIHTHMCYSNFNDIIHSIINMDADVITIENSRSDEKLLSVFREGVTYGAGIGPGVYDIHSPRIPTAEEIADRVNKMLAVLDTNILWVNPDCGLKTRKYAEVMPALTNMVTAAKLIRTQLASTK

SEQ ID NO: 556 - protein, 211 aa, Phleum pratense
KGMLTGPVTILNWSFVRNDQPRFETCYQIALAIKKEVEDLEAGGIQVIQIDEAALREGLPLRKSEHAFYLDWAVHSFRITNCGVQDTTQIHTHMCYSNFNDIIHSIINMDADVITIENSRSDEKLLSVFREGVTYGAGIGPGVYDIHSPRIPTAEEIADRVNKMLAVLDTNILWVNPDCGLKTRKYAEVMPALTNMVTAAKLIRTQLASTK

SEQ ID NO: 557 - protein, 45 aa, Phleum pratense
VFREGVVYGAGIGPGVYDIHSPRIPSKEEIADRVNKMLAVLDTNI

SEQ ID NO: 558 - protein, 211 aa, Phleum pratense; identical to SEQ ID NO: 556

SEQ ID NO: 559 - protein, 212 aa, Phleum pratense
MKGMLTGPVTILNWSFVRNDQPRFETCYQIALAIKKEVEDLEAGGIQVIQIDEAALREGLPLRKSEHAFYLDWAVHSFRITNCGVQDTTQIHTHMCYSNFNDIIHSIINMDADVITIENSRSDEKLLSVFREGVTYGAGIGPGVYDIHSPRIPTAEEIADRVNKMLAVLDTNILWVNPDCGLKTRKYAEVMPALTNMVTAAKLIRTQLASTK

SEQ ID NO: 560 - protein, 215 aa, Phleum pratense; identical to SEQ ID NO: 555

SEQ ID NO: 561 - protein, 201 aa, Phleum pratense
LNWSFVRNDQPRFETCYQIALAIKKEVEDLEAGGIQVIQIDEAALREGLPLRKSEHAFYLDWAVHSFRITNCGVQDTTQIHTHMCYSNFNDIIHSIINMDADVITIENSRSDEKLLSVFREGVTYGAGIGPGVYDIHSPRIPTAEEIADRVNKMLAVLDTNILWVNPDCGLKTRKYAEVMPALTNMVTAAKLIRTQLASTK

SEQ ID NO: 562 - protein, 161 aa, Phleum pratense
PRPMKGMLTGPVTILNWSFVRNDQPRFETCYQIALAIKKEVEDLEAGGIQVIQIDEAALREGLPLRKSEHAFYLDWAVHSFRITNCGVQDTTQIHTHMCYSNFNDIIHSIINMDADVITIENSRSDEKLLSVFREGVTYGAGIGPGVYDIHSPRIPTAEEI

SEQ ID NO: 563 - protein, 71 aa, Phleum pratense
LSELRNELGGRGIKDEGLVVAPGQGPEGLTVGNIIAGDRFSMAYDRTPEEILAIVYGTGNPAQAGGFFPQG

SEQ ID NO: 564 - protein, 260 aa, Phleum pratense
MSTAEATREENVYMAKLAEQAERYEEMVEFMEKVAKTADVGELTVEERNLLSVAYKNVIGARRASWRIISSIEQKEESRGNEAYVASIKEYRTRIETELSKICDGILKLLDSHLVPSATAAESKVFYLKMKGDYHRYLAEFKAGAERKEAAENTLVAYKSAQDIALADLPTTHPIRLGLALNFSVFYYEILNSPDRACNLAKQAFDEAIAELDSLGEESYKDSTLIMQLLRDNLTLWTSDNADEGGDEIKEASKPEGEGH

SEQ ID NO: 565 - protein, 260 aa, Phleum pratense; identical to SEQ ID NO: 564

SEQ ID NO: 566 - protein, 158 aa, Phleum pratense
SIEQKEESRGNEAYVASIKEYRTRIETELSKICDGILKLLDSHLVPSATAAESKVFYLKMKGDYHRYLAEFKAGAERKEAAENTLVAYKSAQDIALADLPTTHPIRLGLALNFSVFYYEILNSPDRACNLAKQAFDEAIAELDSLGEESYKDSTLIMQ

SEQ ID NO: 567 - protein, 160 aa, Phleum pratense
MSTAEATREENVYMAKLAEQAERYEEMVEFMEKVAKTADVGELTVEERNLLSVAYKNVIGARRASWRIISSIEQKEESRGNEAYVASIKEYRTRIETELSKICDGILKLLDSHLVPSATAAESKVFYLKMKGDYHRYLAEFKAGAERKEAAENTLVAYKS

SEQ ID NO: 568 - protein, 260 aa, Phleum pratense; identical to SEQ ID NO: 564

SEQ ID NO: 569 - protein, 114 aa, Phleum pratense
RKEAAENTLVAYKSAQDIALADLPTTHPIRLGLALNFSVFYYEILNSPDRACNLAKQAFDEAIAELDSLGEESYKDSTLIMQLLRDNLTLWTSDNADEGGDEIKEASKPEGEGH

SEQ ID NO: 570 - protein, 80 aa, Phleum pratense
FSVFYYEILNSPDRACNLAKQAFDEAISELDSLGEESYKDSTLIMQLLRDNLTLWTSDTNEDGGDEIKEAPAPKESGDGQ

SEQ ID NO: 571 - protein, 242 aa, Phleum pratense
YMAKLAEQAERYEEMVEFMEKVAKTADVGELTVEERNLLSVAYKNVIGARRASWRIISSIEQKEESRGNEAYVASIKEYRTRIETELSKICDGILKLLDSHLVPSATAAESKVFYLKMKGDYHRYLAEFKAGAERKEAAENTLVAYKSAQDIALADLPTTHPIRLGLALNFSVFYYEILNSPDRACNLAKQAFDEAIAELDSLGEESYKDSTLIMQLLRDNLTLWTSDNADEGGDEIKEASK

SEQ ID NO: 572 - protein, 143 aa, Phleum pratense
MSTAEATREENVYMAKLAEQAERYEEMVEFMEKVAKTADVGELTVEERNLLSVAYKNVIGARRASWRIISSIEQKEESRGNEAYVASIKEYRTRIETELSKICDGILKLLDSHLVPSATAAESKVFYLKMKGDYHRYLAEFKA

SEQ ID NO: 573 - protein, 117 aa, Phleum pratense
GAERKEAAENTLVAYKSAQDIALADLPTTHPIRLGLALNFSVFYYEILNSPDRACNLAKQAFDEAIAELDSLGEESYKDSTLIMQLLRDNLTLWTSDNADEGGDEIKEASKPEGEGH

SEQ ID NO: 574 - protein, 117 aa, Phleum pratense; identical to SEQ ID NO: 573

SEQ ID NO: 575 - protein, 144 aa, Phleum pratense
MSTAEATREENVYMAKLAEQAERYEEMVEFMEKVAKTADVGELTVEERNLLSVAYKNVIGARRASWRIISSIEQKEESRGNEAYVASIKEYRTRIETELSKICDGILKLLDSHLVPSATAAESKVFYLKMKGDYHRYLAEFKAG

SEQ ID NO: 576 - protein, 260 aa, Phleum pratense; identical to SEQ ID NO: 564

SEQ ID NO: 577 - protein, 228 aa, Phleum pratense
RPSSVLPPDLRSAEAELQPPRRPPMAVKVYVVYYSMYGHVGKLAEEIKKGASSVEGVEVKVWQVHEILAEEVLGKMGAPPKTDVPIISPQELAEADGILFGFPTRFGMMASQMKAFFDATGGLWREQSLAGKPAGVFFSTGTQGGGQETTPLTAVTQLTHHGMVFVPVGYTFGAKMFDMEKVQGGSPYGAGTFAGDGSRWPSEMELEHAFHQGKYFAGIAKKLKGSSA

SEQ ID NO: 578 - protein, 164 aa, Phleum pratense
PEILSEEVLGKMGAPPKTDVPIISPQELAEADGILFGFPTRFGMMASQMKAFFDATGGLWREQSLAGKPAGVFFSTGTQGGGQETTPLTAVTQLTHHGMVFVPVGYTFGAKMFDMEKVQGGSPYGAGTFAGDGSRWPSEMELEHAFHQGKYFAGIAKKLKGSSA

SEQ ID NO: 579 - protein, 164 aa, Phleum pratense; identical to SEQ ID NO: 578

SEQ ID NO: 580 - protein, 131 aa, Phleum pratense
VGKLAEEIKKGASSVEGVEVKVWQVPEILSEEVLGKMGAPPKTDVPIISPQELAEADGILFGFPTRFGMMASQMKAFFDATGGLWREQSLAGKPAGVFFSTGTQGGGQETTPLTAVTQLTHHGMVFVPVGY

SEQ ID NO: 581 - protein, 115 aa, Phleum pratense
GILFGFPTRFGMMASQMKAFFDATGGLWREQSLAGKPAGVFFSTGTQGGGQETTPLTAVTQLTHHGMVFVPVGYTFGAKMFDMEKVQGGSPYGAGTFAGDGSRWPSEMELEHAFH

SEQ ID NO: 582 - protein, 235 aa, Phleum pratense
QGTATSAGSRALPFLLQLTKQPATRPSSVLPPDLRSAEAELQPPRRPPMAVKVYVVYYSMYGHVGKLAEEIKKGASSVEGVEVKVWQVPEILSEEVLGKMGAPPKTDVPIISPQELAEADGILFGFPTRFGMMASQMKAFFDATGGLWREQSLAGKPAGVFFSTGTQGGGQETTPLTAVTQLTHHGMVFVPVGYTFGAKMFDMEKVQGGSPYGAGTFAGDGSRWPSEMELEHAFH

SEQ ID NO: 583 - protein, 141 aa, Phleum pratense
MAVKVYVVYYSMYGHVGKLAEEIKKGASSVEGVEVKVWQVPEILSEEVLGKMGAPPKTDVPIISPQELAEADGILFGFPTRFGMMASQMKAFFDATGGLWREQSLAGKPAGVFFSTGTQGGGQETTPLTAVTQLTQHGMVF

SEQ ID NO: 584 - protein, 182 aa, Phleum pratense
IKKGASSVEGVEVKVWQVPEILSEEVLGKMGAPPKTDVPIISPQELAEADGILFGFPTRFGMMASQMKAFFDATGGLWREQSLAGKPAGVFFSTGTQGGGQETTPLTAVTQLTHHGMVFVPVGYTFGAKMFDMEKVQGGSPYGAGTFAGDGSRWPSEMELEHAFHQGKYFAGIAKKLKGSSA

SEQ ID NO: 585 - protein, 182 aa, Phleum pratense; identical to SEQ ID NO: 584

SEQ ID NO: 586 - protein, 175 aa, Phleum pratense
VEGVEVKVWQVPEILSEEVLGKMGAPPKTDVPIISPQELAEADGILFGFPTRFGMMASQMKAFFDATGGLWREQSLAGKPAGVFFSTGTQGGGQETTPLTAVTQLTHHGMVFVPVGYTFGAKMFDMEKVQGGSPYGAGTFAGDGSRWPSEMELEHAFHQGKYFAGIAKKLKGSSA

SEQ ID NO: 587 - protein, 148 aa, Phleum pratense
KTDVPIISPQELAEADGILFGFPTRFGMMASQMKAFFDATGGLWREQSLAGKPAGVFFSTGTQGGGQETTPLTAVTQLTHHGMVFVPVGYTFGAKMFDMEKVQGGSPYGAGTFAGDGSRWPSEMELEHAFHQGKYFAGIAKKLKGSSA

SEQ ID NO: 588 - protein, 21 aa, Phleum pratense
ADVYPTVCLPMCVCVLFVTCS

SEQ ID NO: 589 - protein, 662 aa, Phleum pratense
GLGRLAACFLDSMATLNLPAWGYGLRYRYGLFKQRIAKEGQEEIAEDWLEKFSPWEIVRHDVVYPVRFFGHVEILPDGRRKSAGGEVLNALAYDVPIPGYKTKNAISLRLWDAKASAEDFNLFQFNDGQYESAAQLHSRAQQICAVLYPGDATEEGKLLRLKQQFFLCSASLQDIIFRFKERKSDRVSGKWSEFPSKVAVQMNDTHPTLAIPELMRLLMDEEGLGWDEAWDVTNKTVAYTNHTVLPEALEKWSQSVMRKLLPRQMEIIEEIDKRFREMVISTRKDMEGKLDSMSVLDNSPQKPVVRMANLCVVSAHTVNGVAELHSNILKEELFADYVSIWPKKFQNKTNGITPRRWLRFCNPELSEIVTKWLKTDQWTSNLDLLTGLRKFADDEKLHAEWAAAKLASKKRLAKHVLDATGVTIDPTSLFDIQIKRIHEYKRQLMNILGAVYRYKKLKEMSAEEKQKVTPRTVMVGGKAFATYTNAKRIVKLVNDVGAVVNNDPDVNKYLKVVFIPNYNVSVAEVLIPGSELSQHISTAGMEASGTSNMKFSLNGCVIIGTLDGANVEIREEVGEDNFFLFGAKADQVAGLRKDRENGLFKPDPRFEEAKQYIRSGTFGTYDYTPLLDSLEGNSGFGRGDYFLVGYDFPSYIDAQARVDEAY

SEQ ID NO: 590 - protein, 704 aa, Phleum pratense
GLGRLAACFLDSMATLNLPAWGYGLRYRYGLFKQRIAKEGQEEIAEDWLEKFSPWEIVRHDVVYPVRFFGHVEILPDGRRKSAGGEVLNALAYDVPIPGYKTKNAISLRLWDAKASAEDFNLFQFNDGQYESAAQLHSRAQQICAVLYPGDATEEGKLLRLKQQFFLCSASLQDIIFRFKERKSDRVSGKWSEFPSKVAVQMNDTHPTLAIPELMRLLMDEEGLGWDEAWDVTNKTVAYTNHTVLPEALEKWSQSVMRKLLPRQMEIIEEIDKRFREMVISTRKDMEGKLDSMSVLDNSPQKPVVRMANLCVVSAHTVNGVAELHSNILKEELFADYVSIWPKKFQNKTNGITPRRWLRFCNPELSEIVTKWLKTDQWTSNLDLLTGLRKFADDEKLHAEWAAAKLASKKRLAKHVLDATGVTIDPTSLFDIQIKRIHEYKRQLMNILGAVYRYKKLKEMSAEEKQKVTPRTVMVGGKAFATYTNAKRIVKLVNDVGAVVNNDPDVNKYLKVVFIPNYNVSVAEVLIPGSELSQHISTAGMEASGTSNMKFSLNGCVIIGTLDGANVEIREEVGEDNFFLFGAKADQVAGLRKDRENGLFKPDPRFEEAKQYIRSGTFGTYDYTPLLDSLEGNSGFGRGDYFLVGYDFPSYIDAQARVDEAYKDKKRWIKMSILNTAGSGKFSSDRTIDQYAKEIWGITANPVP

SEQ ID NO: 591 - protein, 704 aa, Phleum pratense
GLGRLAACFLDSMATLNLPAWGYGLRYRYGLFKQRIAKEGQEEIAEDWLEKFSPWEIVRHDVVYPVRFFGHVEILPDGRRKSAGGEVLNALAYDVPIPGYKTKNAISLRLWDAKASAEDFNLFQFNDGQYESAAQLHSRAQQICAVLYPGDATEEGKLLRLKQQFFLCSASLQDIIFRFKERKADRVSGKWSEFPSKVAVQMNDTHPTLAIPELMRLLMDEEGLGWDEAWDVTNKTVAYTNHTVLPEALEKWSQSVMRKLLPRQMEIIEEIDKRFREMVISTRKDMEGKLDSMSVLDNSPQKPVVRMANLCVVSAHTVNGVAELHSNILKEELFADYVSIWPKKFQNKTNGITPRRWLRFCNPELSEIVTKWLKTDQWTSNLDLLTGLRKFADDEKLHAEWAAAKLASKKRLAKHVLDATGVTIDPTSLFDIQIKRIHEYKRQLMNILGAVYRYKKLKEMSAEEKQKVTPRTVMVGGKAFATYTNAKRIVKLVNDVGAVVNNDPDVNKYLKVVFIPNYNVSVAEVLIPGSELSQHISTAGMEASGTSNMKFSLNGCVIIGTLDGANVEIREEVGEDNFFLFGAKADQVAGLRKDRENGLFKPDPRFEEAKQYIRSGTFGTYDYTPLLDSLEGNSGFGRGDYFLVGYDFPSYIDAQARVDEAYKDKKRWIKMSILNTAGSGKFSSDRTIDQYAKEIWGITANPVP

SEQ ID NO: 592 - protein, 380 aa, Phleum pratense
GNISYHAHYSPHFSPLAFGPEPAYFATAESVRDHLLQRWNDTYLHFHKTDPKQTYYLSMEYLQGRALTNAVGNLGITGAYAEAVKKFGYELEALAGQERDMALGNGGLGRLAACFLDSMATLNLPAWGYGLRYRYGLFKQRIAKEGQEEIAEDWLEKFSPWEIVRHDVVYPVRFFGHVEISPDGSRKSAGGEVLNALAYDVPIPGYKTKNAISLRLWDAKASAEDFNLFQFNDGQYESAAQLHSRAQQICAVLYPGDATEEGKLLRLKQQFFLCSASLQDIIFRFKERKSDRVSGKWSEFPSKVAVQMNDTHPTLAIPELMRLLMDEEGLGWDEAWDVTNKTVAYTNHTVLPEALEKWSQSVMRKLLPRQMEIIEEIDKR

SEQ ID NO: 593 - protein, 810 aa, Phleum pratense
GNISYHAHYSPHFSPLAFGPEPAYFATAESVRDHLLQRWNDTYLHFHKTDPKQTYYLSMEYLQGRALTNAVGNLGITGAYAEAVKKFGYELEALAGQERDMALGNGGLGRLAACFLDSMATLNLPAWGYGLRYRYGLFKQRIAKEGQEEIAEDWLEKFSPWEIVRHDVVYPVRFFGHVEISPDGSRKSAGGEVLNALAYDVPIPGYKTKNAISLRLWDAKASAEDFNLFQFNDGQYESAAQLHSRAQQICAVLYPGDATEEGKLLRLKQQFFLCSASLQDIIFRFKERKSDRVSGKWSEFPSKVAVQMNDTHPTLAIPELMRLLMDEEGLGWDEAWDVTNKTVAYTNHTVLPEALEKWSQSVMRKLLPRQMEIIEEIDKRFREMVISTRKDMEGKLDSMSVLDNSPQKPVVRMANLCVVSAHTVNGVAELHSNILKEELFADYVSIWPKKFQNKTNGITPRRWLRFCNPELSEIVTKWLKTDQWTSNLDLLTGLRKFADDEKLHAEWAAAKLASKKRLAKHVLDATGVTIDPTSLFDIQIKRIHEYKRQLMNILGAVYRYKKLKEMSAEEKQKVTPRTVMVGGKAFATYTNAKRIVKLVNDVGAVVNNDPDVNKYLKVVFIPNYNVSVAEVLIPGSELSQHISTAGMEASGTSNMKFSLNGCVIIGTLDGANVEIREEVGEDNFFLFGAKADQVAGLRKDRENGLFKPDPRFEEAKQYIRSGTFGTYDYTPLLDSLEGNSGFGRGDYFLVGYDFPSYIDAQARVDEAYKDKKRWIKMSILNTAGSGKFSSDRTIDQYAKEIWGITANPVP

SEQ ID NO: 594 - protein, 701 aa, Phleum pratense
RLAACFLDSMATLNLPAWGYGLRYRYGLFKQRIAKEGQEEIAEDWLEKFSPWEIVRHDVVYPVRFFGHVEISPDGSRKSAGGEVLNALAYDVPIPGYKTKNAISLRLWDAKASAEDFNLFQFNDGQYESAAQLHSRAQQICAVLYPGDATEEGKLLRLKQQFFLCSASLQDIIFRFKERKSDRVSGKWSEFPSKVAVQMNDTHPTLAIPELMRLLMDEEGLGWDEAWDVTNKTVAYTNHTVLPEALEKWSQSVMRKLLPRQMEIIEEIDKRFREMVISTRKDMEGKLDSMSVLDNSPQKPVVRMANLCVVSAHTVNGVAELHSNILKEELFADYVSIWPKKFQNKTNGITPRRWLRFCNPELSEIVTKWLKTDQWTSNLDLLTGLRKFADDEKLHAEWAAAKLASKKRLAKHVLDATGVTIDPTSLFDIQIKRIHEYKRQLMNILGAVYRYKKLKEMSAEEKQKVTPRTVMVGGKAFATYTNAKRIVKLVNDVGAVVNNDPDVNKYLKVVFIPNYNVSVAEVLIPGSELSQHISTAGMEASGTSNMKFSLNGCVIIGTLDGANVEIREEVGEDNFFLFGAKADQVAGLRKDRENGLFKPDPRFEEAKQYIRSGTFGTYDYTPLLDSLEGNSGFGRGDYFLVGYDFPSYIDAQARVDEAYKDKKRWIKMSILNTAGSGKFSSDRTIDQYAKEIWGITANPVP

SEQ ID NO: 595 - protein, 615 aa, Phleum pratense
RYRYGLFKQRIAKEGQEEIAEDWLEKFSPWEIVRHDVVYPVRFFGHVEISPDGSRKSAGGEVLNALAYDVPIPGYKTKNAISLRLWDAKASAEDFNLFQFNDGQYESAAQLHSRAQQICAVLYPGDATEEGKLLRLKQQFFLCSASLQDIIFRFKERKSDRVSGKWSEFPSKVAVQMNDTHPTLAIPELMRLLMDEEGLGWDEAWDVTNKTVAYTNHTVLPEALEKWSQSVMRKLLPRQMEIIEEIDKRFREMVISTRKDMEGKLDSMSVLDNSPQKPVVRMANLCVVSAHTVNGVAELHSNILKEELFADYVSIWPKKFQNKTNGITPRRWLRFCNPELSEIVTKWLKTDQWTSNLDLLTGLRKFADDEKLHAEWAAAKLASKKRLAKHVLDATGVTIDPTSLFDIQIKRIHEYKRQLMNILGAVYRYKKLKEMSAEEKQKVTPRTVMVGGKAFATYTNAKRIVKLVNDVGAVVNNDPDVNKYLKVVFIPNYNVSVAEVLIPGSELSQHISTAGMEASGTSNMKFSLNGCVIIGTLDGANVEIREEVGEDNFFLFGAKADQVAGLRKDRENGLFKPDPRFEEAKQYIRSGTFGTYDYTPLLDSLEGNSGFGRGE

SEQ ID NO: 596 - protein, 615 aa, Phleum pratense; identical to SEQ ID NO: 595

SEQ ID NO: 597 - protein, 479 aa, Phleum pratense
ISYHAHYSPHFSPLAFGPEPAYFATAESVRDHLLQRWNDTYLHFHKTDPKQTYYLSMEYLQGRALTNAVGNLGITGAYAEAVKKFGYELEALAGQERDMALGNGGLGRLAACFLDSMATLNLPAWGYGLRYRYGLFKQRIAKEGQEEIAEDWLEKFSPWEIVRHDVVYPVRFFGHVEILPDGRRKSAGGEVLNALAYDVPIPGYKTKNAISLRLWDAKASAEDFNLFQFNDGQYESAAQLHSRAQQICAVLYPGDATEEGKLLRLKQQFFLCSASLQDIIFRFKERKSDRVSGKWSEFPSKVAVQMNDTHPTLAIPELMRLLMDEEGLGWDEAWDVTNKTVAYTNHTVLPEALEKWSQSVMRKLLPRQMEIIEEIDKRFREMVISTRKDMEGKLDSMSVLDNSPQKPVVRMANLCVVSAHTVNGVAELHSNILKEELFADYVSIWPKKFQNKTNGITPRRWLRFCNPELSEIVTKWLKT

SEQ ID NO: 598 - protein, 727 aa, Phleum pratense
VKKFGYELEALAGQERDMALGNGGLGRLAACFLDSMATLNLPAWGYGLRYRYGLFKQRIAKEGQEEIAEDWLEKFSPWEIVRHDVVYPVRFFGHVEILPDGRRKSAGGEVLNALAYDVPIPGYKTKNAISLRLWDAKASAEDFNLFQFNDGQYESAAQLHSRAQQICAVLYPGDATEEGKLLRLKQQFFLCSASLQDIIFRFKERKSDRVSGKWSEFPSKVAVQMNDTHPTLAIPELMRLLMDEEGLGWDEAWDVTNKTVAYTNHTVLPEALEKWSQSVMRKLLPRQMEIIEEIDKRFREMVISTRKDMEGKLDSMSVLDNSPQKPVVRMANLCVVSAHTVNGVAELHSNILKEELFADYVSIWPKKFQNKTNGITPRRWLRFCNPELSEIVTKWLKTDQWTSNLDLLTGLRKFADDEKLHAEWAAAKLASKKRLAKHVLDATGVTIDPTSLFDIQIKRIHEYKRQLMNILGAVYRYKKLKEMSAEEKQKVTPRTVMVGGKAFATYTNAKRIVKLVNDVGAVVNNDPDVNKYLKVVFIPNYNVSVAEVLIPGSELSQHISTAGMEASGTSNMKFSLNGCVIIGTLDGANVEIREEVGEDNFFLFGAKADQVAGLRKDRENGLFKPDPRFEEAKQYIRSGTFGTYDYTPLLDSLEGNSGFGRGDYFLVGYDFPSYIDAQARVDEAYKDKKRWIKMSILNTAGSGKFSSDRTIDQYAKEIWGITANPVP

SEQ ID NO: 599 - protein, 705 aa, Phleum pratense
RPRRRLAACFLDSMATLNLPAWGYGLRYRYGLFKQRIAKEGQEEIAEDWLEKFSPWEIVRHDVVYPVRFFGHVEILPDGRRKSAGGEVLNALAYDVPIPGYKTKNAISLRLWDAKASAEDFNLFQFNDGQYESAAQLHSRAQQICAVLYPGDATEEGKLLRLKQQFFLCSASLQDIIFRFKERKSDRVSGKWSEFPSKVAVQMNDTHPTLAIPELMRLLMDEEGLGWDEAWDVTNKTVAYTNHTVLPEALEKWSQSVMRKLLPRQMEIIEEIDKRFREMVISTRKDMEGKLDSMSVLDNSPQKPVVRMANLCVVSAHTVNGVAELHSNILKEELFADYVSIWPKKFQNKTNGITPRRWLRFCNPELSEIVTKWLKTDQWTSNLDLLTGLRKFADDEKLHAEWAAAKLASKKRLAKHVLDATGVTIDPTSLFDIQIKRIHEYKRQLMNILGAVYRYKKLKEMSAEEKQKVTPRTVMVGGKAFATYTNAKRIVKLVNDVGAVVNNDPDVNKYLKVVFIPNYNVSVAEVLIPGSELSQHISTAGMEASGTSNMKFSLNGCVIIGTLDGANVEIREEVGEDNFFLFGAKADQVAGLRKDRENGLFKPDPRFEEAKQYIRSGTFGTYDYTPLLDSLEGNSGFGRGDYFLVGYDFPSYIDAQARVDEAYKDKKRWIKMSILNTAGSGKFSSDRTIDQYAKEIWGITANPVP

SEQ ID NO: 600 - protein, 705 aa, Phleum pratense
RPRRRLAACFLDSMATLNLPAWGYGLRYRYGLFKQRIAKEGQEEIAEDWLEKFSPWEIVRHDVVYPVRFFGHVEILPDGRRKSAGGEVLNALAYDVPIPGYKTKNAISLRLWDAKASAEDFNLFQFNDGQYESAAQLHSRAQQICAVLYPGDATEEGKLLRLKQQFFLCSASLQDIIFRFKERKADRVSGKWSEFPSKVAVQMNDTHPTLAIPELMRLLMDEEGLGWDEAWDVTNKTVAYTNHTVLPEALEKWSQSVMRKLLPRQMEIIEEIDKRFREMVISTRKDMEGKLDSMSVLDNSPQKPVVRMANLCVVSAHTVNGVAELHSNILKEELFADYVSIWPKKFQNKTNGITPRRWLRFCNPELSEIVTKWLKTDQWTSNLDLLTGLRKFADDEKLHAEWAAAKLASKKRLAKHVLDATGVTIDPTSLFDIQIKRIHEYKRQLMNILGAVYRYKKLKEMSAEEKQKVTPRTVMVGGKAFATYTNAKRIVKLVNDVGAVVNNDPDVNKYLKVVFIPNYNVSVAEVLIPGSELSQHISTAGMEASGTSNMKFSLNGCVIIGTLDGANVEIREEVGEDNFFLFGAKADQVAGLRKDRENGLFKPDPRFEEAKQYIRSGTFGTYDYTPLLDSLEGNSGFGRGDYFLVGYDFPSYIDAQARVDEAYKDKKRWIKMSILNTAGSGKFSSDRTIDQYAKEIWGITANPVP

SEQ ID NO: 601 - protein, 678 aa, Phleum pratense
FRYGLFKQRIAKEGQEEIAEDWLEKFSPWEIVRHDVVYPVRFFGHVEILPDGRRKSAGGEVLNALAYDVPIPGYKTKNAISLRLWDAKASAEDFNLFQFNDGQYESAAQLHSRAQQICAVLYPGDATEEGKLLRLKQQFFLCSASLQDIIFRFKERKSDRVSGKWSEFPSKVAVQMNDTHPTLAIPELMRLLMDEEGLGWDEAWDVTNKTVAYTNHTVLPEALEKWSQSVMRKLLPRQMEIIEEIDKRFREMVISTRKDMEGKLDSMSVLDNSPQKPVVRMANLCVVSAHTVNGVAELHSNILKEELFADYVSIWPKKFQNKTNGITPRRWLRFCNPELSEIVTKWLKTDQWTSNLDLLTGLRKFADDEKLHAEWAAAKLASKKRLAKHVLDATGVTIDPTSLFDIQIKRIHEYKRQLMNILGAVYRYKKLKEMSAEEKQKVTPRTVMVGGKAFATYTNAKRIVKLVNDVGAVVNNDPDVNKYLKVVFIPNYNVSVAEVLIPGSELSQHISTAGMEASGTSNMKFSLNGCVIIGTLDGANVEIREEVGEDNFFLFGAKADQVAGLRKDRENGLFKPDPRFEEAKQYIRSGTFGTYDYTPLLDSLEGNSGFGRGDYFLVGYDFPSYIDAQARVDEAYKDKKRWIKMSILNTAGSGKFSSDRTIDQYAKEIWGITANPVP

SEQ ID NO: 602 - protein, 253 aa, Phleum pratense
SIHTDTHARHAQSLPRKQKTHEAMALRTLASKKTLAVALGGARPLATRGVATFTLPDLPYDYGALEPAISGEIMRLHHQKHHATYVANYNKALEQLDAAVSKGDASAVVQLQGAIKFNGGGHVNHSIFWKNLKPTNEGGGEAPHGKLGWAIDEDFGSFDKLVKKMNAEGAALQGSGWVWLALDKEAKKLSVETTANQDPLVTKGANLIPLLGIDVWEHAYYLQYKNVRPDYLTNIWKVVNWKYAGEEYENVAA

SEQ ID NO: 603 - protein, 211 aa, Phleum pratense
RKQKTHEAMALRTLASKKTLAVALGGARPLATRGVATFTLPDLPYDYGALEPAISGEIMRLHHQKHHATYVANYNKALEQLDAAVSKGDASAVVQLQGAIKFNGGGHVNHSIFWKNLKPTNEGGGEAPHGKLGWAIDEDFGSFDKLVKKMNAEGAALQGSGWVWLALDKEAKKLSVETTANQDPLVTKGANLIPLLGIDVWEHAYYLQYKN

SEQ ID NO: 604 - protein, 246 aa, Phleum pratense
ARHAQSLPRKQKTHEAMALRTLASKKTLAVALGGARPLATRGVATFTLPDLPYDYGALEPAISGEIMRLHHQKHHATYVANYNKALEQLDAAVSKGDASAVVQLQGAIKFNGGGHVNHSIFWKNLKPTNEGGGEAPHGKLGWAIDEDFGSFDKLVKKMNAEGAALQGSGWVWLALDKEAKKLSVETTANQDPLVTKGANLIPLLGIDVWEHAYYLQYKNVRPDYLTNIWKVVNWKYAGEEYENVAA

SEQ ID NO: 605 - protein, 209 aa, Phleum pratense
LATRGVATFTLPDLPYDYGALEPAISGEIMRLHHQKHHATYVANYNKALEQLDAAVSKGDASAVVQLQGAIKFNGGGHVNHSIFWKNLKPTNEGGGEAPHGKLGWAIDEDFGSFDKLVKKMNAEGAALQGSGWVWLALDKEAKKLSVETTANQDPLVTKGANLIPLLGIDVWEHAYYLQYKNVRPDYLTNIWKVVNWKYAGEEYENVAA

SEQ ID NO: 606 - protein, 79 aa, Phleum pratense
GSGWVWLALDKEAKKLSVETTANQDPLVTKGANLIPLLGIDVWEHAYYLQYKNVRPDYLTNIWKVVNWKYAGEEFFFFF

SEQ ID NO: 607 - protein, 172 aa, Phleum pratense
RHAQSLPRKQKTHEAMALRTLASKKTLAVALGGARPLATRGVATFTLPDLPYDYGALEPAISGEIMRLHHQKHHATYVANYNKALEQLDAAVSKGDASAVVQLQGAIKFNGGGHVNHSIFWKNLKPTNEGGGEAPHGKLGWAIDEDFGSFDKLVKKMNAEGAALQGSGWVWL

SEQ ID NO: 608 - protein, 133 aa, Phleum pratense
HSIFWKNLKPTNEGGGEAPHGKLGWAIDEDFGSFDKLVKKMNAEGAALQGSGWVWLALDKEAKKLSVETTANQDPLVTKGANLIPLLGIDVWEHAYYLQYKNVRPDYLTNIWKVVNWKYAGEEYENVAAEYFV

SEQ ID NO: 609 - protein, 179 aa, Phleum pratense
PGDRPSEMAANPRVFFDVTIGGAPAGRIVMELYADVVPKTAENFRALCTGEKGVGKMGKPLHYKGSSFHRVIPGFMCQGGDFTAGNGTGGESIYGAKFADENFIKKHTGEGVLSMANAGPGTNGSQFFLCTAKTAWLDGKHVVFGQVVEGMDVVKAVEKVGSQSGRCSKPVVIADCGQL

SEQ ID NO: 610 - protein, 191 aa, Phleum pratense
RNPNPQTPASTDPGDRASEMAANPRVFFDVTIGGAPAGRIVMELYADVVPKTAENFRALCTGEKGVGKMGKPLHYKGSSFHRVIPGFMCQGGDFTAGNGTGGESIYGAKFADENFIKKHTGEGVLSMANAGPGTNGSQFFLCTAKTAWLDGKHVVFGQVVEGMDVVKAVEKVGSQSGRCSKPVVIADCGQL

SEQ ID NO: 611 - protein, 172 aa, Phleum pratense
MAPNPKVFFDITIGGAPSGRIVMELYADVVPKTAENFRALCTGEKGVGKMGKPLHYKGSSFHRVIPGFMCQGGDFTAGNGTGGESIYGAKFADENFIKKHTGEGVLSMANAGPGTNGSQFFLCTAKTAWLDGKHVVFGQVVEGMDVVKAIEKVGSQSGRCSKPVVIADCGQL

SEQ ID NO: 612 - protein, 172 aa, Phleum pratense; identical to SEQ ID NO: 611

SEQ ID NO: 613 - protein, 172 aa, Phleum pratense; identical to SEQ ID NO: 611

SEQ ID NO: 614 - protein, 172 aa, Phleum pratense
MAPNPKVFFDITIGGAPSGRIVMELYADVVPKTAENFRALCTGEKGVGKMGKPLHYKGSSFHRVIPGFMCQGGDFTAGNGTGGESIYGAKFADENFIKKHTGEGVLSMANAGPGTNGSQFFLCTAKTAWLDGKHVVFGQVVEGMDVVKAVEKVGSQSGRCSKPVVIADCGQL

SEQ ID NO: 615 - protein, 172 aa, Phleum pratense; identical to SEQ ID NO: 614

SEQ ID NO: 616 - protein, 84 aa, Phleum pratense
AKFADENFVKKHTGPGVLSMANAGPGTNGSQFFLCTAKTAWLDGKHVVFGQVVEGMDVVKAIEKVGSQSGRCSKPVVIADCGQL

SEQ ID NO: 617 - protein, 111 aa, Phleum pratense
PLKWSGFMCQGGDFTKGNGTGGESIYGAKFADENFVKKHTGPGVLSMANAEPGTNGSQFFLCTAKTAWLDGKHVVFGQVVEGMDVVKAVEKVGSQSGRCSKPVVIADCGQL

SEQ ID NO: 618 - protein, 115 aa, Phleum pratense
GSSFHRVIPDFMCQGGDFTKGNGTGGESIYGAKFADENFVKKHTGPGVLSMANAGPGTNGSQFFLCTAKTAWLDGKHVVFGQVVEGMDVVKAVEKVGSQSGRCSKPVVIADCGQL

SEQ ID NO: 619 - protein, 58 aa, Phleum pratense
SQVHIRRPGGAGRDGGQLRIPSLLHGGHGCAQPAMERRKHIEWNCDVCRHGDDKKKVD

SEQ ID NO: 620 - protein, 54 aa, Phleum pratense
WTTVMRASCGHHRFRDCVISSLADFKLFPVLQHIISIAVLAIFIGLLMIEDTGA

SEQ ID NO: 621 - protein, 15 aa, Phleum pratense
SDGTFARAAVPSGAS

SEQ ID NO: 622 - protein, 15 aa, Phleum pratense
RAAVPSGASTGVYEA

SEQ ID NO: 623 - protein, 15 aa, Phleum pratense
GASTGVYEALELRDG

SEQ ID NO: 624 - protein, 15 aa, Phleum pratense
LGKGVLKGNRANVEL

SEQ ID NO: 625 - protein, 15 aa, Phleum pratense
NRANVELFHIAVLLA

SEQ ID NO: 626 - protein, 15 aa, Phleum pratense
QTELDNFMVHQLDGT

SEQ ID NO: 627 - protein, 15 aa, Phleum pratense
CKQKVFFNISADADA

SEQ ID NO: 628 - protein, 15 aa, Phleum pratense
PAMAATIQSVKARQI

SEQ ID NO: 629 - protein, 15 aa, Phleum pratense
VDNVNSIIGPALIGK

SEQ ID NO: 630 - protein, 15 aa, Phleum pratense
KLGANAILAVSLAVC

SEQ ID NO: 631 - protein, 15 aa, Phleum pratense
KKIPLYQHIANLAGN

SEQ ID NO: 632 - protein, 15 aa, Phleum pratense
GNKQLVLPVPAFNVI

SEQ ID NO: 633 - protein, 15 aa, Phleum pratense
KLAMQEFMILPTGAS

SEQ ID NO: 634 - protein, 15 aa, Phleum pratense
KMGVEVYHNLKSVIK

SEQ ID NO: 635 - protein, 15 aa, Phleum pratense
GKVVIGMDVAASEFY

SEQ ID NO: 636 - protein, 15 aa, Phleum pratense
VYKSFVSEYPIVSIE

SEQ ID NO: 637 - protein, 15 aa, Phleum pratense
IVGDDLLVTNPTRVA

SEQ ID NO: 638 - protein, 15 aa, Phleum pratense
NALLLKVNQIGSVTE

SEQ ID NO: 639 - protein, 15 aa, Phleum pratense
ETEDTFIADLAVGLS

SEQ ID NO: 640 - protein, 15 aa, Phleum pratense
ERLAKYNQLLRIEEE

SEQ ID NO: 641 - protein, 15 aa, Phleum pratense
LGAAAVYAGLKFRAP

SEQ ID NO: 642 - protein, 15 aa, Phleum pratense
ADPCSEYFVEAYLNN

SEQ ID NO: 643 - protein, 15 aa, Phleum pratense
YFVEAYLNNPLVQKA

SEQ ID NO: 644 - protein, 15 aa, Phleum pratense
VQKAIHANTALNYPW

SEQ ID NO: 645 - protein, 15 aa, Phleum pratense
PSMLAHIKALVTTGI

SEQ ID NO: 646 - protein, 15 aa, Phleum pratense
LYSGDLDAMVPVTAS

SEQ ID NO: 647 - protein, 15 aa, Phleum pratense
LNYPWTGCRTRTYNL

SEQ ID NO: 648 - protein, 15 aa, Phleum pratense
YNLRRFGASPPSMLA

SEQ ID NO: 649 - protein, 15 aa, Phleum pratense
HIKALVTTASASGCT

SEQ ID NO: 650 - protein, 15 aa, Phleum pratense
QEMAYWSLKAAIEIG

SEQ ID NO: 651 - protein, 15 aa, Phleum pratense
DAASSLYLFGENLPR

SEQ ID NO: 652 - protein, 15 aa, Phleum pratense
GYNISLASMIPDYDT

SEQ ID NO: 653 - protein, 15 aa, Phleum pratense
YDTVITNVRRSLAVA

SEQ ID NO: 654 - protein, 15 aa, Phleum pratense
LEKIVAILSAFVDAA

SEQ ID NO: 655 - protein, 15 aa, Phleum pratense
NVRRSLAVAKKNHLA

SEQ ID NO: 656 - protein, 15 aa, Phleum pratense
VAKKNHLAWNCERCR

SEQ ID NO: 657 - protein, 15 aa, Phleum pratense
LAWNCERCRKGESKK

SEQ ID NO: 658 - protein, 15 aa, Phleum pratense
KKTVDAILSAFVDAA

SEQ ID NO: 659 - protein, 15 aa, Phleum pratense
GSGDFKTIKEALAKV

SEQ ID NO: 660 - protein, 15 aa, Phleum pratense
MYVMYIKEGTYKEYV

SEQ ID NO: 661 - protein, 15 aa, Phleum pratense
YKEYVTVPRTVTNLV

SEQ ID NO: 662 - protein, 15 aa, Phleum pratense
VTNLVMIGDGAAKTI

SEQ ID NO: 663 - protein, 15 aa, Phleum pratense
NFKMNLTSMVAVSLV

SEQ ID NO: 664 - protein, 15 aa, Phleum pratense
YQDTLYTHAQRQFFR

SEQ ID NO: 665 - protein, 15 aa, Phleum pratense
GTIDFIFGNSQVVIQ

SEQ ID NO: 666 - protein, 15 aa, Phleum pratense
AKTIILKFLLPVMIV

SEQ ID NO: 667 - protein, 15 aa, Phleum pratense
ALTHTTIVASGIENM

SEQ ID NO: 668 - protein, 15 aa, Phleum pratense
MKIFTRTWVLLLLVV

SEQ ID NO: 669 - protein, 15 aa, Phleum pratense
LLLLVVLLFEGCLAK

SEQ ID NO: 670 - protein, 15 aa, Phleum pratense
KDTHYTLSAWLQLSK

SEQ ID NO: 671 - protein, 15 aa, Phleum pratense
GKGELFFETNVTAEL

SEQ ID NO: 672 - protein, 15 aa, Phleum pratense
VTAELMVDSMSLQPF

SEQ ID NO: 673 - protein, 15 aa, Phleum pratense
YEKWFTSRFTVATME

SEQ ID NO: 674 - protein, 15 aa, Phleum pratense
KQMDWVSKLSAPQLK

SEQ ID NO: 675 - protein, 15 aa, Phleum pratense
KPILFMNEYNTIEEP

SEQ ID NO: 676 - protein, 15 aa, Phleum pratense
TKYLAKLKQIQSYPG

SEQ ID NO: 677 - protein, 15 aa, Phleum pratense
PYVRGSLDTLAQAKV

SEQ ID NO: 678 - protein, 15 aa, Phleum pratense
PKQVEYLEEVMREGF

SEQ ID NO: 679 - protein, 15 aa, Phleum pratense
NVTAELVDSMSLQPF

SEQ ID NO: 680 - protein, 15 aa, Phleum pratense
NIPATWGAMEKLYDA

SEQ ID NO: 681 - protein, 15 aa, Phleum pratense
GAMEKLYDAGKARAI

SEQ ID NO: 682 - protein, 15 aa, Phleum pratense
KARAIGVSNLASKKL

SEQ ID NO: 683 - protein, 15 aa, Phleum pratense
VSNLASKKLGDLLAV

SEQ ID NO: 684 - protein, 15 aa, Phleum pratense
KKLGDLLAVARIPPA

SEQ ID NO: 685 - protein, 15 aa, Phleum pratense
SVFKKFPKFRRVLVI

SEQ ID NO: 686 - protein, 15 aa, Phleum pratense
PKFRRVLVIDPVISG

SEQ ID NO: 687 - protein, 15 aa, Phleum pratense
IGEIKGFADAVMVSR

SEQ ID NO: 688 - protein, 15 aa, Phleum pratense
FADAVMVSRGSLVRV

SEQ ID NO: 689 - protein, 15 aa, Phleum pratense
VSRGSLVRVNGFFLT

SEQ ID NO: 690 - protein, 15 aa, Phleum pratense
VNGFFLTGFNDLVTE

SEQ ID NO: 691 - protein, 15 aa, Phleum pratense
QIIRKGFYLTKNVEH

SEQ ID NO: 692 - protein, 15 aa, Phleum pratense
FYLTKNVEHKGQVDL

SEQ ID NO: 693 - protein, 15 aa, Phleum pratense
VEHKGQVDLVTETDK

SEQ ID NO: 694 - protein, 15 aa, Phleum pratense
TDKACEDLIFNHLRK

SEQ ID NO: 695 - protein, 15 aa, Phleum pratense
DLIFNHLRKLYPDHK

SEQ ID NO: 696 - protein, 15 aa, Phleum pratense
AEFEGVFLDFARQQA

SEQ ID NO: 697 - protein, 15 aa, Phleum pratense
VDKLFKLAEAAKLKE

SEQ ID NO: 698 - protein, 15 aa, Phleum pratense
ENRSVLHVALRAPRD

SEQ ID NO: 699 - protein, 15 aa, Phleum pratense
FLGPLFVHTALQTDP

SEQ ID NO: 700 - protein, 15 aa, Phleum pratense
RQLRFLANVDPVDVA

SEQ ID NO: 701 - protein, 15 aa, Phleum pratense
VVSKTFTTAETMLNA

SEQ ID NO: 702 - protein, 15 aa, Phleum pratense
IKEWIVSSLGPQAVS

SEQ ID NO: 703 - protein, 15 aa, Phleum pratense
VSKHMIAVSTNLKLV

SEQ ID NO: 704 - protein, 15 aa, Phleum pratense
RYSVCSAVGVLPLSL

SEQ ID NO: 705 - protein, 15 aa, Phleum pratense
AVGVLPLSLQYGFPI

SEQ ID NO: 706 - protein, 15 aa, Phleum pratense
LSLQYGFPIVQRFLE

SEQ ID NO: 707 - protein, 15 aa, Phleum pratense
FPIVQRFLEGASSID

SEQ ID NO: 708 - protein, 15 aa, Phleum pratense
HFRTASFEKNIPVLL

SEQ ID NO: 709 - protein, 15 aa, Phleum pratense
VLLGLLSVWNVSFLG

SEQ ID NO: 710 - protein, 15 aa, Phleum pratense
SVWNVSFLGYPARAI

SEQ ID NO: 711 - protein, 15 aa, Phleum pratense
ARAILPYSQALEKLA

SEQ ID NO: 712 - protein, 15 aa, Phleum pratense
NGQHSFYQLIHQGRV

SEQ ID NO: 713 - protein, 15 aa, Phleum pratense
CDFIGVIKSQQPVYL

SEQ ID NO: 714 - protein, 15 aa, Phleum pratense
ELMSNFFAQPDALAY

SEQ ID NO: 715 - protein, 15 aa, Phleum pratense
KTFKGNRPSLSFLLS

SEQ ID NO: 716 - protein, 15 aa, Phleum pratense
PSLSFLLSSLSAYEI

SEQ ID NO: 717 - protein, 15 aa, Phleum pratense
AYEIGQLLAIYEHRI

SEQ ID NO: 718 - protein, 15 aa, Phleum pratense
LLAIYEHRIAVQGFI

SEQ ID NO: 719 - protein, 15 aa, Phleum pratense
QGFIWGINSFDQWGV

SEQ ID NO: 720 - protein, 15 aa, Phleum pratense
PVEGFNPSSASLLAR

SEQ ID NO: 721 - protein, 15 aa, Phleum pratense
PSSASLLARYLAVEP

SEQ ID NO: 722 - protein, 15 aa, Phleum pratense
KELGGKILRQPGPLP

SEQ ID NO: 723 - protein, 15 aa, Phleum pratense
ILRQPGPLPGLNTKI

SEQ ID NO: 724 - protein, 15 aa, Phleum pratense
LRGLNTKIASFLDPD

SEQ ID NO: 725 - protein, 15 aa, Phleum pratense
KIASFLDPDGWKVVL

SEQ ID NO: 726 - protein, 15 aa, Phleum pratense
GWKVVLVDHADFLKE

SEQ ID NO: 727 - protein, 15 aa, Phleum pratense
QDNAKIVQIDSSIQA

SEQ ID NO: 728 - protein, 15 aa, Phleum pratense
RLVCLRVHPTFTLLH

SEQ ID NO: 729 - protein, 15 aa, Phleum pratense
HPTFTLLHPTEVVVA

SEQ ID NO: 730 - protein, 15 aa, Phleum pratense
TEVVVAFTAINGSRQ

SEQ ID NO: 731 - protein, 15 aa, Phleum pratense
LVNRFEISQVSKCLV

SEQ ID NO: 732 - protein, 15 aa, Phleum pratense
ILLVFAETAEPEVKV

SEQ ID NO: 733 - protein, 15 aa, Phleum pratense
EPEVKVVDLTILSPD

SEQ ID NO: 734 - protein, 15 aa, Phleum pratense
LKDGSTYSFRFSFIV

SEQ ID NO: 735 - protein, 15 aa, Phleum pratense
SFRFSFIVSNNIVSG

SEQ ID NO: 736 - protein, 15 aa, Phleum pratense
DDGKVYLEMSYYFEI

SEQ ID NO: 737 - protein, 15 aa, Phleum pratense
VKKIVTVLNEAEVPS

SEQ ID NO: 738 - protein, 15 aa, Phleum pratense
EDAVEVVVSPPFVFL

SEQ ID NO: 739 - protein, 15 aa, Phleum pratense
VSPPFVFLQQAKALL

SEQ ID NO: 740 - protein, 15 aa, Phleum pratense
FLQQAKALLRPDFAV

SEQ ID NO: 741 - protein, 15 aa, Phleum pratense
ALLRPDFAVAAQNCW

SEQ ID NO: 742 - protein, 15 aa, Phleum pratense
GAFTGEISAEMLVNL

SEQ ID NO: 743 - protein, 15 aa, Phleum pratense
ISAEMLVNLQVPWVI

SEQ ID NO: 744 - protein, 15 aa, Phleum pratense
ESNDFVADKVAYALA

SEQ ID NO: 745 - protein, 15 aa, Phleum pratense
ADKVAYALAQGLKVI

SEQ ID NO: 746 - protein, 15 aa, Phleum pratense
TTMEVVAAQTKAIAE

SEQ ID NO: 747 - protein, 15 aa, Phleum pratense
WTNVVLAYEPVWAIG

SEQ ID NO: 748 - protein, 15 aa, Phleum pratense
LRKWLHANVGPAVAE

SEQ ID NO: 749 - protein, 15 aa, Phleum pratense
PEFVDIIKSATVKSS

SEQ ID NO: 750 - protein, 15 aa, Phleum pratense
LNGPFIATVQQRGAA

SEQ ID NO: 751 - protein, 15 aa, Phleum pratense
QQRGAAIIKARKLSS

SEQ ID NO: 752 - protein, 15 aa, Phleum pratense
IIKARKLSSALSAAS

SEQ ID NO: 753 - protein, 15 aa, Phleum pratense
LSSALSAASSACDHI

SEQ ID NO: 754 - protein, 15 aa, Phleum pratense
GTPEGTFVSMGVYSD

SEQ ID NO: 755 - protein, 15 aa, Phleum pratense
IEIDSLFEGIDFYST

SEQ ID NO: 756 - protein, 15 aa, Phleum pratense
IDFYSTITRARFEEL

SEQ ID NO: 757 - protein, 15 aa, Phleum pratense
IPKVQQLLQDFFNGK

SEQ ID NO: 758 - protein, 15 aa, Phleum pratense
EAVAYGAAVQAAILS

SEQ ID NO: 759 - protein, 15 aa, Phleum pratense
VQDLLLLDVTPLSLG

SEQ ID NO: 760 - protein, 15 aa, Phleum pratense
LMSFSWICACVRAAA

SEQ ID NO: 761 - protein, 15 aa, Phleum pratense
ICACVRAAAVAWEAG

SEQ ID NO: 762 - protein, 15 aa, Phleum pratense
VRVKILFTALCHTDV

SEQ ID NO: 763 - protein, 15 aa, Phleum pratense
MCDLLRINTDRGVMI

SEQ ID NO: 764 - protein, 15 aa, Phleum pratense
KPIFHFVGTSTFSEY

SEQ ID NO: 765 - protein, 15 aa, Phleum pratense
VGTSTFSEYTVMHVG

SEQ ID NO: 766 - protein, 15 aa, Phleum pratense
VAIFGLGAVGLAAAE

SEQ ID NO: 767 - protein, 15 aa, Phleum pratense
GAVGLAAAEGARIAG

SEQ ID NO: 768 - protein, 15 aa, Phleum pratense
GNINAMIQAFECVHD

SEQ ID NO: 769 - protein, 15 aa, Phleum pratense
LKGTFFGNFKPRTDL

SEQ ID NO: 770 - protein, 15 aa, Phleum pratense
KFITHSVTFSEINKA

SEQ ID NO: 771 - protein, 15 aa, Phleum pratense
VTFSEINKAFDLMAK

SEQ ID NO: 772 - protein, 15 aa, Phleum pratense
ALRWNLQMGHSVLPK

SEQ ID NO: 773 - protein, 15 aa, Phleum pratense
NLDVYDWSIPDDLLA

SEQ ID NO: 774 - protein, 15 aa, Phleum pratense
DDLLAKFSEIKQTRL

SEQ ID NO: 775 - protein, 15 aa, Phleum pratense
FSEIKQTRLLMGNFI

SEQ ID NO: 776 - protein, 15 aa, Phleum pratense
TRLLMGNFIVNKDSV

SEQ ID NO: 777 - protein, 15 aa, Phleum pratense
MKTIFDFESIKKLLA

SEQ ID NO: 778 - protein, 15 aa, Phleum pratense
FESIKKLLASPKFSF

SEQ ID NO: 779 - protein, 15 aa, Phleum pratense
RMFVDELGASESSLL

SEQ ID NO: 780 - protein, 15 aa, Phleum pratense
PNLTYAKELVERMGL

SEQ ID NO: 781 - protein, 15 aa, Phleum pratense
RNMVLGKRFFVTPSD

SEQ ID NO: 782 - protein, 15 aa, Phleum pratense
KRFFVTPSDSVAIIA

SEQ ID NO: 783 - protein, 15 aa, Phleum pratense
SDSVAIIAANAVQSI

SEQ ID NO: 784 - protein, 15 aa, Phleum pratense
AVQSIPYFASGLKGV

SEQ ID NO: 785 - protein, 15 aa, Phleum pratense
KNLNLKFFEVPTGWK

SEQ ID NO: 786 - protein, 15 aa, Phleum pratense
GIWAVLAWLSIIAYK

SEQ ID NO: 787 - protein, 15 aa, Phleum pratense
NLGGDKLVSVEDIVL

SEQ ID NO: 788 - protein, 15 aa, Phleum pratense
LVSVEDIVLQHWATY

SEQ ID NO: 789 - protein, 15 aa, Phleum pratense
KELMANLVKMQSALS

SEQ ID NO: 790 - protein, 15 aa, Phleum pratense
LVKMQSALSDVNKLI

SEQ ID NO: 791 - protein, 15 aa, Phleum pratense
HQGIRYLFGDGSRLV

SEQ ID NO: 792 - protein, 15 aa, Phleum pratense
SRLVFRLSGTGSVGA

SEQ ID NO: 793 - protein, 15 aa, Phleum pratense
GATIRIYIEQYEKDS

SEQ ID NO: 794 - protein, 15 aa, Phleum pratense
DALSPLVDVALKLSK

SEQ ID NO: 795 - protein, 15 aa, Phleum pratense
QDFKKVNEIYAKYFP

SEQ ID NO: 796 - protein, 15 aa, Phleum pratense
NEIYAKYFPSPAPAR

SEQ ID NO: 797 - protein, 15 aa, Phleum pratense
YFPSPAPARSTYQVA

SEQ ID NO: 798 - protein, 15 aa, Phleum pratense
ARSTYQVAALPLDAR

SEQ ID NO: 799 - protein, 15 aa, Phleum pratense
LPLDARIEIECIAAL

SEQ ID NO: 800 - protein, 15 aa, Phleum pratense
PPPGQHIAMAASSRR

SEQ ID NO: 801 - protein, 15 aa, Phleum pratense
ASQLLGSAASRFLHS

SEQ ID NO: 802 - protein, 15 aa, Phleum pratense
SRFLHSRGYAAAAAA

SEQ ID NO: 803 - protein, 15 aa, Phleum pratense
RGYAAAAAAPSPAVF

SEQ ID NO: 804 - protein, 15 aa, Phleum pratense
LGLPVFNSVAEAKAE

SEQ ID NO: 805 - protein, 15 aa, Phleum pratense
TKANASVIYVPPPFA

SEQ ID NO: 806 - protein, 15 aa, Phleum pratense
VIYVPPPFAAAAIME

SEQ ID NO: 807 - protein, 15 aa, Phleum pratense
PFAAAAIMEALEAEL

SEQ ID NO: 808 - protein, 15 aa, Phleum pratense
QHDMVKVKAALNRQS

SEQ ID NO: 809 - protein, 15 aa, Phleum pratense
TLTYEAVFQTTAVGL

SEQ ID NO: 810 - protein, 15 aa, Phleum pratense
DKPVVAFIAGLTAPP

SEQ ID NO: 811 - protein, 15 aa, Phleum pratense
KIKALREAGVTVVES

SEQ ID NO: 812 - protein, 15 aa, Phleum pratense
GSTMFEIFKQRGMVE

SEQ ID NO: 813 - protein, 15 aa, Phleum pratense
TVSDEYLAAVAKARR

SEQ ID NO: 814 - protein, 15 aa, Phleum pratense
LDIAVRLLEPIKEQV

SEQ ID NO: 815 - protein, 15 aa, Phleum pratense
IKEQVPILSYADFYQ

SEQ ID NO: 816 - protein, 15 aa, Phleum pratense
ILSYADFYQLAGVVA

SEQ ID NO: 817 - protein, 15 aa, Phleum pratense
FYQLAGVVAVEITGG

SEQ ID NO: 818 - protein, 15 aa, Phleum pratense
DHLRQVFTAQMGLSD

SEQ ID NO: 819 - protein, 15 aa, Phleum pratense
NPLIFDNSYFTELLT

SEQ ID NO: 820 - protein, 15 aa, Phleum pratense
EDAFFADYAEAHLKL

SEQ ID NO: 821 - protein, 15 aa, Phleum pratense
EDSHFVVELTYNYGV

SEQ ID NO: 822 - protein, 15 aa, Phleum pratense
RAIKFYEKAFGMELL

SEQ ID NO: 823 - protein, 15 aa, Phleum pratense
NPQYKYTIAMMGYGP

SEQ ID NO: 824 - protein, 15 aa, Phleum pratense
KNAVLELTYNYGVKE

SEQ ID NO: 825 - protein, 15 aa, Phleum pratense
DGWKSVFVDNLDFLK

SEQ ID NO: 826 - protein, 15 aa, Phleum pratense
EEAASTLPGLSSSTL

SEQ ID NO: 827 - protein, 15 aa, Phleum pratense
TLLFPHTQISLPSVR

SEQ ID NO: 828 - protein, 15 aa, Phleum pratense
VRTRKHLAATMADEK

SEQ ID NO: 829 - protein, 15 aa, Phleum pratense
DNEKSGFISLVSRYL

SEQ ID NO: 830 - protein, 15 aa, Phleum pratense
FISLVSRYLSGEEEH

SEQ ID NO: 831 - protein, 15 aa, Phleum pratense
EATKALLNKLAVLKL

SEQ ID NO: 832 - protein, 15 aa, Phleum pratense
IEVRNGFTFLDLIVL

SEQ ID NO: 833 - protein, 15 aa, Phleum pratense
FLDLIVLQIESLNKK

SEQ ID NO: 834 - protein, 15 aa, Phleum pratense
LNKKYGSNVPLLLMN

SEQ ID NO: 835 - protein, 15 aa, Phleum pratense
NVPLLLMNSFNTHED

SEQ ID NO: 836 - protein, 15 aa, Phleum pratense
LKIVEKYANSSIDIH

SEQ ID NO: 837 - protein, 15 aa, Phleum pratense
SIDIHTFNQSQYPRV

SEQ ID NO: 838 - protein, 15 aa, Phleum pratense
GKLDLLLSQGKEYVF

SEQ ID NO: 839 - protein, 15 aa, Phleum pratense
GKEYVFIANSDNLGA

SEQ ID NO: 840 - protein, 15 aa, Phleum pratense
SDNLGAIVDMKILNH

SEQ ID NO: 841 - protein, 15 aa, Phleum pratense
IVDMKILNHLIHKQN

SEQ ID NO: 842 - protein, 15 aa, Phleum pratense
ISYEGRVQLLEIAQV

SEQ ID NO: 843 - protein, 15 aa, Phleum pratense
VQLLEIAQVPDAHVD

SEQ ID NO: 844 - protein, 15 aa, Phleum pratense
FKSIEKFKIFNTNNL

SEQ ID NO: 845 - protein, 15 aa, Phleum pratense
FKIFNTNNLWVNLKA

SEQ ID NO: 846 - protein, 15 aa, Phleum pratense
NNLWVNLKAIKRLVE

SEQ ID NO: 847 - protein, 15 aa, Phleum pratense
IKRLVEADALKMEII

SEQ ID NO: 848 - protein, 15 aa, Phleum pratense
VKVLQLETAAGAAIR

SEQ ID NO: 849 - protein, 15 aa, Phleum pratense
AAIRFFDHAIGINVP

SEQ ID NO: 850 - protein, 15 aa, Phleum pratense
GINVPRSRFLPVKAT

SEQ ID NO: 851 - protein, 15 aa, Phleum pratense
RFLPVKATSDLQLVQ

SEQ ID NO: 852 - protein, 15 aa, Phleum pratense
TSDLQLVQSDLYTLV

SEQ ID NO: 853 - protein, 15 aa, Phleum pratense
VQSDLYTLVDGFVTR

SEQ ID NO: 854 - protein, 15 aa, Phleum pratense
GPEFKKVGSFLGRFK

SEQ ID NO: 855 - protein, 15 aa, Phleum pratense
GRFKSIPSIVELDSL

SEQ ID NO: 856 - protein, 15 aa, Phleum pratense
LQSKNCILYLCSIMI

SEQ ID NO: 857 - protein, 15 aa, Phleum pratense
ILYLCSIMICNCKVS

SEQ ID NO: 858 - protein, 15 aa, Phleum pratense
IMICNCKVSKVLNTY

SEQ ID NO: 859 - protein, 15 aa, Phleum pratense
KVSKVLNTYIFLLYL

SEQ ID NO: 860 - protein, 15 aa, Phleum pratense
GTIRNIINGTVFREP

SEQ ID NO: 861 - protein, 15 aa, Phleum pratense
VFNFTGAGGVALAMY

SEQ ID NO: 862 - protein, 15 aa, Phleum pratense
IQGFAEASMAIAYEK

SEQ ID NO: 863 - protein, 15 aa, Phleum pratense
ASMAIAYEKKWPLYL

SEQ ID NO: 864 - protein, 15 aa, Phleum pratense
EKKWPLYLSTKNTIL

SEQ ID NO: 865 - protein, 15 aa, Phleum pratense
GRFKDIFQAVYEADW

SEQ ID NO: 866 - protein, 15 aa, Phleum pratense
WYEHRLIDDMVAYAL

SEQ ID NO: 867 - protein, 15 aa, Phleum pratense
VQSDFLAQGFGSLGL

SEQ ID NO: 868 - protein, 15 aa, Phleum pratense
NSIASIFAWTRGLAH

SEQ ID NO: 869 - protein, 15 aa, Phleum pratense
DNARLLDFTQKLEDA

SEQ ID NO: 870 - protein, 15 aa, Phleum pratense
MTKDLALLVHGSSKV

SEQ ID NO: 871 - protein, 15 aa, Phleum pratense
LNTEEFIDAVAAELQ

SEQ ID NO: 872 - protein, 15 aa, Phleum pratense
NTRVLLLRRTSPFSA

SEQ ID NO: 873 - protein, 15 aa, Phleum pratense
DGYYIHGQCAIIMFD

SEQ ID NO: 874 - protein, 15 aa, Phleum pratense
QCAIIMFDVTSRLTY

SEQ ID NO: 875 - protein, 15 aa, Phleum pratense
RKKNLQYYEISAKSN

SEQ ID NO: 876 - protein, 15 aa, Phleum pratense
SAKSNYNFEKPFLYL

SEQ ID NO: 877 - protein, 15 aa, Phleum pratense
KPFLYLARKLAGDAN

SEQ ID NO: 878 - protein, 15 aa, Phleum pratense
ANIHFVEAVALKPPE

SEQ ID NO: 879 - protein, 15 aa, Phleum pratense
EAELAAAAAQPLPDD

SEQ ID NO: 880 - protein, 15 aa, Phleum pratense
YQPAAMRRLSLILLA

SEQ ID NO: 881 - protein, 15 aa, Phleum pratense
RRLSLILLAAAALLA

SEQ ID NO: 882 - protein, 15 aa, Phleum pratense
LLAAAALLAAAVSAE

SEQ ID NO: 883 - protein, 15 aa, Phleum pratense
CPRAERIIAEVVQSK

SEQ ID NO: 884 - protein, 15 aa, Phleum pratense
AFDAVVRSKLALELE

SEQ ID NO: 885 - protein, 15 aa, Phleum pratense
CADILAIASRVLVTM

SEQ ID NO: 886 - protein, 15 aa, Phleum pratense
NFTVGRIIELFTAKG

SEQ ID NO: 887 - protein, 15 aa, Phleum pratense
IIELFTAKGFTVQEM

SEQ ID NO: 888 - protein, 15 aa, Phleum pratense
FTVQEMVALSGAHTL

SEQ ID NO: 889 - protein, 15 aa, Phleum pratense
IAAFNDIMSSSVLSS

SEQ ID NO: 890 - protein, 15 aa, Phleum pratense
FDNIYSVNIERGLGL

SEQ ID NO: 891 - protein, 15 aa, Phleum pratense
NTDFFEDFAKAIEKL

SEQ ID NO: 892 - protein, 15 aa, Phleum pratense
TDTIVYCAGRTFFFR

SEQ ID NO: 893 - protein, 15 aa, Phleum pratense
GRTFFFRRLDAPLDA

SEQ ID NO: 894 - protein, 15 aa, Phleum pratense
KSLVRAFMWDSGSTV

SEQ ID NO: 895 - protein, 15 aa, Phleum pratense
RVLSCDFKPTRPFRI

SEQ ID NO: 896 - protein, 15 aa, Phleum pratense
HTGSIYAVSWSADSK

SEQ ID NO: 897 - protein, 15 aa, Phleum pratense
AGHLKTVSSLTYFPQ

SEQ ID NO: 898 - protein, 15 aa, Phleum pratense
VSSLTYFPQSNPRTM

SEQ ID NO: 899 - protein, 15 aa, Phleum pratense
SYDGVIIRWIQGVGY

SEQ ID NO: 900 - protein, 15 aa, Phleum pratense
TQIKCFVAAEEELIT

SEQ ID NO: 901 - protein, 15 aa, Phleum pratense
NALNIAVQQPEFALI

SEQ ID NO: 902 - protein, 15 aa, Phleum pratense
PEFALITTDSAIVLL

SEQ ID NO: 903 - protein, 15 aa, Phleum pratense
TDSAIVLLHKSTVTS

SEQ ID NO: 904 - protein, 15 aa, Phleum pratense
TKVSYTITSSAVSPD

SEQ ID NO: 905 - protein, 15 aa, Phleum pratense
KLRIYSISGDTLTEE

SEQ ID NO: 906 - protein, 15 aa, Phleum pratense
IHYSPDVSMFASADA

SEQ ID NO: 907 - protein, 15 aa, Phleum pratense
IKLKNMLFHTARINC

SEQ ID NO: 908 - protein, 15 aa, Phleum pratense
STKIFLESSTMESRA

SEQ ID NO: 909 - protein, 15 aa, Phleum pratense
CAAVLAASAVVVLVV

SEQ ID NO: 910 - protein, 15 aa, Phleum pratense
VVVLVVASGLAGSRV

SEQ ID NO: 911 - protein, 15 aa, Phleum pratense
LAGSRVVRVAVDVAT

SEQ ID NO: 912 - protein, 15 aa, Phleum pratense
GWYHLFYQYNPEGAV

SEQ ID NO: 913 - protein, 15 aa, Phleum pratense
SRDLIHWRHLPLAMV

SEQ ID NO: 914 - protein, 15 aa, Phleum pratense
LNMLYTGSTNASVQV

SEQ ID NO: 915 - protein, 15 aa, Phleum pratense
IAMVYKTKDFVSYEL

SEQ ID NO: 916 - protein, 15 aa, Phleum pratense
TKDFVSYELIPGLLH

SEQ ID NO: 917 - protein, 15 aa, Phleum pratense
WGKFYASKTFYDPAK

SEQ ID NO: 918 - protein, 15 aa, Phleum pratense
KGWASLMSIPRTVDL

SEQ ID NO: 919 - protein, 15 aa, Phleum pratense
LRHATQLDIEAAFRL

SEQ ID NO: 920 - protein, 15 aa, Phleum pratense
EAAFRLDHAAVAALN

SEQ ID NO: 921 - protein, 15 aa, Phleum pratense
EQTAVYFYVSRGLDG

SEQ ID NO: 922 - protein, 15 aa, Phleum pratense
VKRVVGYTVPVLDGE

SEQ ID NO: 923 - protein, 15 aa, Phleum pratense
EAFSVRVLVDHSIVE

SEQ ID NO: 924 - protein, 15 aa, Phleum pratense
EAIYAAAGVYLFNNA

SEQ ID NO: 925 - protein, 15 aa, Phleum pratense
VYLFNNATSGTVTVE

SEQ ID NO: 926 - protein, 15 aa, Phleum pratense
TDIVEVVVSPPYVFL

SEQ ID NO: 927 - protein, 15 aa, Phleum pratense
SPPYVFLPTVKDKLR

SEQ ID NO: 928 - protein, 15 aa, Phleum pratense
GAFTGEVSAEMLANL

SEQ ID NO: 929 - protein, 15 aa, Phleum pratense
VSAEMLANLGIPWVI

SEQ ID NO: 930 - protein, 15 aa, Phleum pratense
GESSEFVGDKVAYAL

SEQ ID NO: 931 - protein, 15 aa, Phleum pratense
GDKVAYALAQGLKVI

SEQ ID NO: 932 - protein, 15 aa, Phleum pratense
STMTVVAEQTKAIAD

SEQ ID NO: 933 - protein, 15 aa, Phleum pratense
DWTNVVIAYEPVWAI

SEQ ID NO: 934 - protein, 15 aa, Phleum pratense
IAYEPVWAIGTGKVA

SEQ ID NO: 935 - protein, 15 aa, Phleum pratense
LKPEFIDIINAATVK

SEQ ID NO: 936 - protein, 15 aa, Phleum pratense
RTSSWGSGASLKIDR

SEQ ID NO: 937 - protein, 15 aa, Phleum pratense
SLKIDRRELVTTRIY

SEQ ID NO: 938 - protein, 15 aa, Phleum pratense
RFLHAAVAMATKRSV

SEQ ID NO: 939 - protein, 15 aa, Phleum pratense
KGKKVFLRADLNVPL

SEQ ID NO: 940 - protein, 15 aa, Phleum pratense
TRIRASIPTIKFLLE

SEQ ID NO: 941 - protein, 15 aa, Phleum pratense
TIKFLLEKGAKVILA

SEQ ID NO: 942 - protein, 15 aa, Phleum pratense
EKGAKVILASHLGRP

SEQ ID NO: 943 - protein, 15 aa, Phleum pratense
VPRLSELLGVEVVMA

SEQ ID NO: 944 - protein, 15 aa, Phleum pratense
GGVLLLENVRFYKEE

SEQ ID NO: 945 - protein, 15 aa, Phleum pratense
PEFAKKLASVADLYV

SEQ ID NO: 946 - protein, 15 aa, Phleum pratense
KFLRPSVAGFLMQKE

SEQ ID NO: 947 - protein, 15 aa, Phleum pratense
VAGFLMQKELDYLVG

SEQ ID NO: 948 - protein, 15 aa, Phleum pratense
KELDYLVGAVANPKK

SEQ ID NO: 949 - protein, 15 aa, Phleum pratense
KIGVIESLLAKVDIL

SEQ ID NO: 950 - protein, 15 aa, Phleum pratense
GMIFTFYKAQGKAVG

SEQ ID NO: 951 - protein, 15 aa, Phleum pratense
EEDKLELATSLIETA

SEQ ID NO: 952 - protein, 15 aa, Phleum pratense
GVSLLLPTDVVVADK

SEQ ID NO: 953 - protein, 15 aa, Phleum pratense
SAPALRILRSFPSHS

SEQ ID NO: 954 - protein, 15 aa, Phleum pratense
VELVAVNDPFITTDY

SEQ ID NO: 955 - protein, 15 aa, Phleum pratense
DYMTYMFKYDTVHGQ

SEQ ID NO: 956 - protein, 15 aa, Phleum pratense
GGAKKVIISAPSKDA

SEQ ID NO: 957 - protein, 15 aa, Phleum pratense
YTSDITIVSNASCTT

SEQ ID NO: 958 - protein, 15 aa, Phleum pratense
KVINDRFGIVEGLMT

SEQ ID NO: 959 - protein, 15 aa, Phleum pratense
FGIVEGLMTTVHAMT

SEQ ID NO: 960 - protein, 15 aa, Phleum pratense
GGRAASFNIIPSSTG

SEQ ID NO: 961 - protein, 15 aa, Phleum pratense
LTVRLEKAATYEQIK

SEQ ID NO: 962 - protein, 15 aa, Phleum pratense
ALNDNFVKLVSWYDN

SEQ ID NO: 963 - protein, 15 aa, Phleum pratense
VWQHDRVEIIANDQG

SEQ ID NO: 964 - protein, 15 aa, Phleum pratense
VEIIANDQGNRTTPS

SEQ ID NO: 965 - protein, 15 aa, Phleum pratense
TTPSYVAFTDSERLI

SEQ ID NO: 966 - protein, 15 aa, Phleum pratense
KNQVAMNPINTVFGE

SEQ ID NO: 967 - protein, 15 aa, Phleum pratense
NPINTVFGEHLSTCT

SEQ ID NO: 968 - protein, 15 aa, Phleum pratense
SSTRGWCSRRRAGRG

SEQ ID NO: 969 - protein, 15 aa, Phleum pratense
EEKQFAAEEISSMVL

SEQ ID NO: 970 - protein, 15 aa, Phleum pratense
SSMVLIKMREIAEAF

SEQ ID NO: 971 - protein, 15 aa, Phleum pratense
SIKNAVVTVPAYFND

SEQ ID NO: 972 - protein, 15 aa, Phleum pratense
GVIAGLNVLRIINEP

SEQ ID NO: 973 - protein, 15 aa, Phleum pratense
VLRIINEPTAAAIAY

SEQ ID NO: 974 - protein, 15 aa, Phleum pratense
GRYFSKDAVQIITKM

SEQ ID NO: 975 - protein, 15 aa, Phleum pratense
DAVQIITKMAAANGV

SEQ ID NO: 976 - protein, 15 aa, Phleum pratense
GVRRVWVGQDSLLST

SEQ ID NO: 977 - protein, 15 aa, Phleum pratense
SLLSTPAVSAIIRER

SEQ ID NO: 978 - protein, 15 aa, Phleum pratense
AVSAIIRERIAADGS

SEQ ID NO: 979 - protein, 15 aa, Phleum pratense
YPHMLLILLLLHGAN

SEQ ID NO: 980 - protein, 15 aa, Phleum pratense
ILLLLHGANAALDEP

SEQ ID NO: 981 - protein, 15 aa, Phleum pratense
ESSLYAYQFAMSNGL

SEQ ID NO: 982 - protein, 15 aa, Phleum pratense
SGLRLDKSTLIAEVF

SEQ ID NO: 983 - protein, 15 aa, Phleum pratense
IHGWFAVDFTAAELV

SEQ ID NO: 984 - protein, 15 aa, Phleum pratense
IGKRFASINVENVED

SEQ ID NO: 985 - protein, 15 aa, Phleum pratense
ALRELLFTTPGALQH

SEQ ID NO: 986 - protein, 15 aa, Phleum pratense
LQHISGVILFEETLY

SEQ ID NO: 987 - protein, 15 aa, Phleum pratense
YEAGARFAKWRAVLK

SEQ ID NO: 988 - protein, 15 aa, Phleum pratense
GLARYAIICQENGLV

SEQ ID NO: 989 - protein, 15 aa, Phleum pratense
RCAYVTEVVLAACYK

SEQ ID NO: 990 - protein, 15 aa, Phleum pratense
NDQHVLLEGSLLKPN

SEQ ID NO: 991 - protein, 15 aa, Phleum pratense
WFLSFSFGRALQQST

SEQ ID NO: 992 - protein, 15 aa, Phleum pratense
SVGFVETLENDLAQL

SEQ ID NO: 993 - protein, 15 aa, Phleum pratense
LGEAPYKFKSALEAV

SEQ ID NO: 994 - protein, 15 aa, Phleum pratense
KFKSALEAVKTLRAE

SEQ ID NO: 995 - protein, 15 aa, Phleum pratense
QYLPAFVIVDESGKS

SEQ ID NO: 996 - protein, 15 aa, Phleum pratense
VVTFNFRADRMVMLA

SEQ ID NO: 997 - protein, 15 aa, Phleum pratense
ADRMVMLAKALEFAD

SEQ ID NO: 998 - protein, 15 aa, Phleum pratense
FDKFDRVRVPKIKYA

SEQ ID NO: 999 - protein, 15 aa, Phleum pratense
PKIKYAGMLQYDGEL

SEQ ID NO: 1000 - protein, 15 aa, Phleum pratense
LKLPNKFLVSPPLIE

SEQ ID NO: 1001 - protein, 15 aa, Phleum pratense
GILLDFVWYEPLTYN

SEQ ID NO: 1002 - protein, 15 aa, Phleum pratense
ETMQRLVADRLPNFT

SEQ ID NO: 1003 - protein, 15 aa, Phleum pratense
GYSKWLYVVPWGFYK

SEQ ID NO: 1004 - protein, 15 aa, Phleum pratense
YVVPWGFYKAVMHVK

SEQ ID NO: 1005 - protein, 15 aa, Phleum pratense
KFRIDYFDQYLHELK

SEQ ID NO: 1006 - protein, 15 aa, Phleum pratense
ARVTGYFAWSLLDNF

SEQ ID NO: 1007 - protein, 15 aa, Phleum pratense
FAWSLLDNFEWRMGF

SEQ ID NO: 1008 - protein, 15 aa, Phleum pratense
EIPTISYSDLYQLAG

SEQ ID NO: 1009 - protein, 15 aa, Phleum pratense
YSDLYQLAGVVAVEV

SEQ ID NO: 1010 - protein, 15 aa, Phleum pratense
DHLRQVFGKQMGLSD

SEQ ID NO: 1011 - protein, 15 aa, Phleum pratense
KNPLKFDNTYFTELL

SEQ ID NO: 1012 - protein, 15 aa, Phleum pratense
KAFFEDYKEAHLRLS

SEQ ID NO: 1013 - protein, 15 aa, Phleum pratense
YKLLCSSFPVITYHQ

SEQ ID NO: 1014 - protein, 15 aa, Phleum pratense
FPVITYHQGRNGNLS

SEQ ID NO: 1015 - protein, 15 aa, Phleum pratense
RNGNLSALACPLNQK

SEQ ID NO: 1016 - protein, 15 aa, Phleum pratense
IPPAPHLKRWNRVVD

SEQ ID NO: 1017 - protein, 15 aa, Phleum pratense
LKRWNRVVDTNLESP

SEQ ID NO: 1018 - protein, 15 aa, Phleum pratense
VVDTNLESPNDIVPE

SEQ ID NO: 1019 - protein, 15 aa, Phleum pratense
GAPFTGSGYRIAPYS

SEQ ID NO: 1020 - protein, 15 aa, Phleum pratense
GYRIAPYSSILLKAT

SEQ ID NO: 1021 - protein, 15 aa, Phleum pratense
ECILSGLLSVDGLKV

SEQ ID NO: 1022 - protein, 15 aa, Phleum pratense
LLSVDGLKVLHMDRN

SEQ ID NO: 1023 - protein, 15 aa, Phleum pratense
VPKFMMANGALVRVL

SEQ ID NO: 1024 - protein, 15 aa, Phleum pratense
VRVLIRTSVTKYLNF

SEQ ID NO: 1025 - protein, 15 aa, Phleum pratense
TKYLNFKAVDGSFVY

SEQ ID NO: 1026 - protein, 15 aa, Phleum pratense
TDVEALKSNLMGLFE

SEQ ID NO: 1027 - protein, 15 aa, Phleum pratense
EKRRARKFFIYVQDY

SEQ ID NO: 1028 - protein, 15 aa, Phleum pratense
KFFIYVQDYEEEDPK

SEQ ID NO: 1029 - protein, 15 aa, Phleum pratense
TVDFIGHALALHRDD

SEQ ID NO: 1030 - protein, 15 aa, Phleum pratense
VKRMKLYAESLARFQ

SEQ ID NO: 1031 - protein, 15 aa, Phleum pratense
GELPQAFARLSAVYG

SEQ ID NO: 1032 - protein, 15 aa, Phleum pratense
FARLSAVYGGTYMLN

SEQ ID NO: 1033 - protein, 15 aa, Phleum pratense
KGKFIAFVSTEAETD

SEQ ID NO: 1034 - protein, 15 aa, Phleum pratense
ETTVKDVLALYSKIT

SEQ ID NO: 1035 - protein, 15 aa, Phleum pratense
LDLSVDLNAASAGES

SEQ ID NO: 1036 - protein, 15 aa, Phleum pratense
FKDDPYIYAFDSLKY

SEQ ID NO: 1037 - protein, 15 aa, Phleum pratense
AFDSLKYIGIELWQV

SEQ ID NO: 1038 - protein, 15 aa, Phleum pratense
IELWQVKSGTLFDNI

SEQ ID NO: 1039 - protein, 15 aa, Phleum pratense
GTLFDNILITDDAAL

SEQ ID NO: 1040 - protein, 15 aa, Phleum pratense
ILITDDAALAKTFAE

SEQ ID NO: 1041 - protein, 15 aa, Phleum pratense
KRPPRCCQDLVVLPL

SEQ ID NO: 1042 - protein, 15 aa, Phleum pratense
RGLLRRARGGPHHRR

SEQ ID NO: 1043 - protein, 15 aa, Phleum pratense
RGAHRRVPLRPLRHR

SEQ ID NO: 1044 - protein, 15 aa, Phleum pratense
EGRRAKLRSAGEVEI

SEQ ID NO: 1045 - protein, 15 aa, Phleum pratense
GEVEIQFRRVKCKYP

SEQ ID NO: 1046 - protein, 15 aa, Phleum pratense
TKVTFHVVGVGPLLH

SEQ ID NO: 1047 - protein, 15 aa, Phleum pratense
EDVAVSLAKYTAELS

SEQ ID NO: 1048 - protein, 15 aa, Phleum pratense
GKFAAERGAFTVVLS

SEQ ID NO: 1049 - protein, 15 aa, Phleum pratense
AFTVVLSGGTLIDTL

SEQ ID NO: 1050 - protein, 15 aa, Phleum pratense
DSNYKLAVDGLLSKV

SEQ ID NO: 1051 - protein, 15 aa, Phleum pratense
TVLKQLVKSGVLAMS

SEQ ID NO: 1052 - protein, 15 aa, Phleum pratense
KSGVLAMSTATGFPR

SEQ ID NO: 1053 - protein, 15 aa, Phleum pratense
PPPQRITFTFPVIKS

SEQ ID NO: 1054 - protein, 15 aa, Phleum pratense
TFTFPVIKSSAYVAM

SEQ ID NO: 1055 - protein, 15 aa, Phleum pratense
KTLPLLPTEMAILQD

SEQ ID NO: 1056 - protein, 15 aa, Phleum pratense
NKLIGARSFFESAKW

SEQ ID NO: 1057 - protein, 15 aa, Phleum pratense
RAHIAFYQVCFEQKG

SEQ ID NO: 1058 - protein, 15 aa, Phleum pratense
AALNGVFVSTAAGNI

SEQ ID NO: 1059 - protein, 15 aa, Phleum pratense
APWLLTVGASTSDRR

SEQ ID NO: 1060 - protein, 15 aa, Phleum pratense
STSDRRFAATVKLGS

SEQ ID NO: 1061 - protein, 15 aa, Phleum pratense
VLRAGAFGMIVVAPA

SEQ ID NO: 1062 - protein, 15 aa, Phleum pratense
FGMIVVAPAVFGPVI

SEQ ID NO: 1063 - protein, 15 aa, Phleum pratense
YAVGQKIKAYLEAES

SEQ ID NO: 1064 - protein, 15 aa, Phleum pratense
VPGVVDIVLQPKEVM

SEQ ID NO: 1065 - protein, 15 aa, Phleum pratense
CPHLAGIAALLKNAH

SEQ ID NO: 1066 - protein, 15 aa, Phleum pratense
GLVYNLTAAEYIPYL

SEQ ID NO: 1067 - protein, 15 aa, Phleum pratense
KADSVVNASRAVTNV

SEQ ID NO: 1068 - protein, 15 aa, Phleum pratense
KLTFKALEEVLNYTV

SEQ ID NO: 1069 - protein, 15 aa, Phleum pratense
EEVLNYTVTVKTAAV

SEQ ID NO: 1070 - protein, 15 aa, Phleum pratense
IEGQLKWVSSKHIVR

SEQ ID NO: 1071 - protein, 15 aa, Phleum pratense
WVSSKHIVRSPILIL

SEQ ID NO: 1072 - protein, 15 aa, Phleum pratense
SFRFFLAHSSIHPST

SEQ ID NO: 1073 - protein, 15 aa, Phleum pratense
EKHFKYVILGGGVAA

SEQ ID NO: 1074 - protein, 15 aa, Phleum pratense
TEKGIELILSTEIVK

SEQ ID NO: 1075 - protein, 15 aa, Phleum pratense
ASKTLTSAAGATFTY

SEQ ID NO: 1076 - protein, 15 aa, Phleum pratense
FTYETLLIATGSSTI

SEQ ID NO: 1077 - protein, 15 aa, Phleum pratense
GGGYIGLELSAALKL

SEQ ID NO: 1078 - protein, 15 aa, Phleum pratense
LELSAALKLNNFDVT

SEQ ID NO: 1079 - protein, 15 aa, Phleum pratense
LKLNNFDVTMVYPEP

SEQ ID NO: 1080 - protein, 15 aa, Phleum pratense
MPRLFTAGIAHFYEG

SEQ ID NO: 1081 - protein, 15 aa, Phleum pratense
HFYEGYYASKGINIV

SEQ ID NO: 1082 - protein, 15 aa, Phleum pratense
SKGINIVKGTVASGF

SEQ ID NO: 1083 - protein, 15 aa, Phleum pratense
DANIVIVGVGGRPLT

SEQ ID NO: 1084 - protein, 15 aa, Phleum pratense
KTDTFFETSVAGVYA

SEQ ID NO: 1085 - protein, 15 aa, Phleum pratense
VYAIGDVASFPMKLY

SEQ ID NO: 1086 - protein, 15 aa, Phleum pratense
DYLPYFYSRSFDIAW

SEQ ID NO: 1087 - protein, 15 aa, Phleum pratense
LLGYLLWVVAIRRPR

SEQ ID NO: 1088 - protein, 15 aa, Phleum pratense
WVVAIRRPRPVRCFS

SEQ ID NO: 1089 - protein, 15 aa, Phleum pratense
EQFVTPWSFSVASGH

SEQ ID NO: 1090 - protein, 15 aa, Phleum pratense
RDAHYLRGLLPPAIV

SEQ ID NO: 1091 - protein, 15 aa, Phleum pratense
MHNLRQYTVPLQRYI

SEQ ID NO: 1092 - protein, 15 aa, Phleum pratense
VPLQRYIAMMDLQER

SEQ ID NO: 1093 - protein, 15 aa, Phleum pratense
ERLFYKLLIDNVEEL

SEQ ID NO: 1094 - protein, 15 aa, Phleum pratense
EELLPVVYTPVVGEA

SEQ ID NO: 1095 - protein, 15 aa, Phleum pratense
RSIQVIVVTDGERIL

SEQ ID NO: 1096 - protein, 15 aa, Phleum pratense
EEYHELLQEFMNAVK

SEQ ID NO: 1097 - protein, 15 aa, Phleum pratense
GEKVLVQFEDFANHN

SEQ ID NO: 1098 - protein, 15 aa, Phleum pratense
FDLLAKYSKSHLVFN

SEQ ID NO: 1099 - protein, 15 aa, Phleum pratense
VFNDDIQGTASVVLA

SEQ ID NO: 1100 - protein, 15 aa, Phleum pratense
SVVLAGLLAALKVIG

SEQ ID NO: 1101 - protein, 15 aa, Phleum pratense
GLADQTYLFLGAGEA

SEQ ID NO: 1102 - protein, 15 aa, Phleum pratense
TGIAELIALEMSKHT

SEQ ID NO: 1103 - protein, 15 aa, Phleum pratense
CRKKIWLVDSKGLLV

SEQ ID NO: 1104 - protein, 15 aa, Phleum pratense
HEPLTTLLEAVQSLK

SEQ ID NO: 1105 - protein, 15 aa, Phleum pratense
LLEAVQSLKPTVLIG

SEQ ID NO: 1106 - protein, 15 aa, Phleum pratense
NEKPVIFSLSNPTSH

SEQ ID NO: 1107 - protein, 15 aa, Phleum pratense
EEAYTWTKGTAVFAS

SEQ ID NO: 1108 - protein, 15 aa, Phleum pratense
GFGLGVVISGAIRVH

SEQ ID NO: 1109 - protein, 15 aa, Phleum pratense
VISGAIRVHDDMLLA

SEQ ID NO: 1110 - protein, 15 aa, Phleum pratense
HDDMLLAASEALAEQ

SEQ ID NO: 1111 - protein, 15 aa, Phleum pratense
FPPFTNIRKISANIA

SEQ ID NO: 1112 - protein, 15 aa, Phleum pratense
IRKISANIAAKVAAK

SEQ ID NO: 1113 - protein, 15 aa, Phleum pratense
PRVNFFKRYNLTCVF

SEQ ID NO: 1114 - protein, 15 aa, Phleum pratense
KRYNLTCVFWSKKKK

SEQ ID NO: 1115 - protein, 15 aa, Phleum pratense
TIVASGIENMKIFTR

SEQ ID NO: 1116 - protein, 15 aa, Phleum pratense
FSCDSAYQVTYIVRG

SEQ ID NO: 1117 - protein, 15 aa, Phleum pratense
YQVTYIVRGSGRVQV

SEQ ID NO: 1118 - protein, 15 aa, Phleum pratense
IEGGSLFIVPRFHVV

SEQ ID NO: 1119 - protein, 15 aa, Phleum pratense
GMEWFSIITTPNPIF

SEQ ID NO: 1120 - protein, 15 aa, Phleum pratense
GKTSVWKAISPEVLE

SEQ ID NO: 1121 - protein, 15 aa, Phleum pratense
ELRKTYNLLDAVSRH

SEQ ID NO: 1122 - protein, 15 aa, Phleum pratense
QVYPRSWSAVMLTFD

SEQ ID NO: 1123 - protein, 15 aa, Phleum pratense
AVMLTFDNAGMWNVR

SEQ ID NO: 1124 - protein, 15 aa, Phleum pratense
NVWERHYLAGEMTLM

SEQ ID NO: 1125 - protein, 15 aa, Phleum pratense
GEQLYISVISPARSL

SEQ ID NO: 1126 - protein, 15 aa, Phleum pratense
DSSEYAFRTAVSSSM

SEQ ID NO: 1127 - protein, 15 aa, Phleum pratense
IGNLRLDNTTLIDKD

SEQ ID NO: 1128 - protein, 15 aa, Phleum pratense
EIPMIQNILSRSQIF

SEQ ID NO: 1129 - protein, 15 aa, Phleum pratense
SRSQIFDGIPNLMSL

SEQ ID NO: 1130 - protein, 15 aa, Phleum pratense
DGIPNLMSLDNVVKI

SEQ ID NO: 1131 - protein, 15 aa, Phleum pratense
IWVNVEYDSFYREHG

SEQ ID NO: 1132 - protein, 15 aa, Phleum pratense
EFPVTWVSSPEVALL

SEQ ID NO: 1133 - protein, 15 aa, Phleum pratense
SPEVALLKSLAGKLR

SEQ ID NO: 1134 - protein, 15 aa, Phleum pratense
AGKLRNSTKLIFRFL

SEQ ID NO: 1135 - protein, 15 aa, Phleum pratense
STKLIFRFLREDLVE

SEQ ID NO: 1136 - protein, 15 aa, Phleum pratense
GELLKDLKSIKAFAS

SEQ ID NO: 1137 - protein, 15 aa, Phleum pratense
LKSIKAFASGILVPK

SEQ ID NO: 1138 - protein, 15 aa, Phleum pratense
CEGILKLLETHLVPS

SEQ ID NO: 1139 - protein, 15 aa, Phleum pratense
LLETHLVPSSTAPES

SEQ ID NO: 1140 - protein, 15 aa, Phleum pratense
PESKVFYLKMKGDYH

SEQ ID NO: 1141 - protein, 15 aa, Phleum pratense
MNSYKAAQDIALADL

SEQ ID NO: 1142 - protein, 15 aa, Phleum pratense
APTHPIRLGLALKIS

SEQ ID NO: 1143 - protein, 15 aa, Phleum pratense
LLGLLAPLASAQLSR

SEQ ID NO: 1144 - protein, 15 aa, Phleum pratense
PDAEKIVAAVIEKKL

SEQ ID NO: 1145 - protein, 15 aa, Phleum pratense
AGLLRLLFHDCFANG

SEQ ID NO: 1146 - protein, 15 aa, Phleum pratense
CDASILIDPLSNQSA

SEQ ID NO: 1147 - protein, 15 aa, Phleum pratense
IDSSYFANVLAKKMP

SEQ ID NO: 1148 - protein, 15 aa, Phleum pratense
KPNDFMPTFAKAMEK

SEQ ID NO: 1149 - protein, 15 aa, Phleum pratense
PTFAKAMEKLSVLKV

SEQ ID NO: 1150 - protein, 15 aa, Phleum pratense
GGSVIRISSANPEDL

SEQ ID NO: 1151 - protein, 15 aa, Phleum pratense
DPWHVKTLKAAGAAH

SEQ ID NO: 1152 - protein, 15 aa, Phleum pratense
WSEIQTLKPNLIGPF

SEQ ID NO: 1153 - protein, 15 aa, Phleum pratense
KFMTLAGFLDYAKAS

SEQ ID NO: 1154 - protein, 15 aa, Phleum pratense
NISGILIGIEHAAYL

SEQ ID NO: 1155 - protein, 15 aa, Phleum pratense
AAYLATRGLDVVDAV

SEQ ID NO: 1156 - protein, 15 aa, Phleum pratense
GLDVVDAVSNALIKS

SEQ ID NO: 1157 - protein, 15 aa, Phleum pratense
TKQQVFIQSEDPPVL

SEQ ID NO: 1158 - protein, 15 aa, Phleum pratense
PVLSAFKKFPKFNRV

SEQ ID NO: 1159 - protein, 15 aa, Phleum pratense
KFPKFNRVFEIEFDI

SEQ ID NO: 1160 - protein, 15 aa, Phleum pratense
VEIKEFANAVKLRRS

SEQ ID NO: 1161 - protein, 15 aa, Phleum pratense
VKLRRSSAAQVDGFY

SEQ ID NO: 1162 - protein, 15 aa, Phleum pratense
GFYLTGFNAVVERLR

SEQ ID NO: 1163 - protein, 15 aa, Phleum pratense
GVLKNEFMSLAFDYW

SEQ ID NO: 1164 - protein, 15 aa, Phleum pratense
GLVTEFPSTAAAYFR

SEQ ID NO: 1165 - protein, 15 aa, Phleum pratense
NIVVNVFNQLDQPLL

SEQ ID NO: 1166 - protein, 15 aa, Phleum pratense
QPLLFTWNGIQHRKN

SEQ ID NO: 1167 - protein, 15 aa, Phleum pratense
IGSFFYFPSIGMQRT

SEQ ID NO: 1168 - protein, 15 aa, Phleum pratense
GYGLISVVSRLLIPV

SEQ ID NO: 1169 - protein, 15 aa, Phleum pratense
VVSRLLIPVPFDPPA

SEQ ID NO: 1170 - protein, 15 aa, Phleum pratense
VCTRLSPFCCLYCIL

SEQ ID NO: 1171 - protein, 15 aa, Phleum pratense
YCILCCWYSMRLVTV

SEQ ID NO: 1172 - protein, 15 aa, Phleum pratense
NIWADDLAASLSTLE

SEQ ID NO: 1173 - protein, 15 aa, Phleum pratense
IAIAFLSVSNNYEYI

SEQ ID NO: 1174 - protein, 15 aa, Phleum pratense
VSNNYEYILSDKLVV

SEQ ID NO: 1175 - protein, 15 aa, Phleum pratense
KDKLVVSTSCSLMHT

SEQ ID NO: 1176 - protein, 15 aa, Phleum pratense
TSCSLMHTAVDLVNE

SEQ ID NO: 1177 - protein, 15 aa, Phleum pratense
TKLDSEIKSWLAFAA

SEQ ID NO: 1178 - protein, 15 aa, Phleum pratense
IKSWLAFAAQKVVEV

SEQ ID NO: 1179 - protein, 15 aa, Phleum pratense
KVVEVNALGKALVGL

SEQ ID NO: 1180 - protein, 15 aa, Phleum pratense
LKDEAYFAANAAAQA

SEQ ID NO: 1181 - protein, 15 aa, Phleum pratense
EAYVSAIKEEISKVV

SEQ ID NO: 1182 - protein, 15 aa, Phleum pratense
ISKVVKIQEELDIDV

SEQ ID NO: 1183 - protein, 15 aa, Phleum pratense
MVEYFGEQLSGFAFT

SEQ ID NO: 1184 - protein, 15 aa, Phleum pratense
LSGFAFTANGWVQSY

SEQ ID NO: 1185 - protein, 15 aa, Phleum pratense
NPMTVFWSKMAQSMT

SEQ ID NO: 1186 - protein, 15 aa, Phleum pratense
EGPLMLYVSKMIPAS

SEQ ID NO: 1187 - protein, 15 aa, Phleum pratense
KGRFFAFGRVFAGRV

SEQ ID NO: 1188 - protein, 15 aa, Phleum pratense
GNTVALVGLDQFITK

SEQ ID NO: 1189 - protein, 15 aa, Phleum pratense
VGLDQFITKNATLTG

SEQ ID NO: 1190 - protein, 15 aa, Phleum pratense
PIRAMKFSVSPVVRV

SEQ ID NO: 1191 - protein, 15 aa, Phleum pratense
FMGGAEIIVSPPVVS

SEQ ID NO: 1192 - protein, 15 aa, Phleum pratense
SPPVVSFRETVLDKS

SEQ ID NO: 1193 - protein, 15 aa, Phleum pratense
NKHNRLYMEARPLEE

SEQ ID NO: 1194 - protein, 15 aa, Phleum pratense
PTARRVIFASQLTAK

SEQ ID NO: 1195 - protein, 15 aa, Phleum pratense
AKPRLLEPVYLVEIQ

SEQ ID NO: 1196 - protein, 15 aa, Phleum pratense
EPVYLVEIQAPEGAL

SEQ ID NO: 1197 - protein, 15 aa, Phleum pratense
PLYNIKAYLPVIESF

SEQ ID NO: 1198 - protein, 15 aa, Phleum pratense
LPVIESFGFSATLRA

SEQ ID NO: 1199 - protein, 15 aa, Phleum pratense
FGFSATLRAATSGQA

SEQ ID NO: 1200 - protein, 15 aa, Phleum pratense
SLKLHKACEAFNPYD

SEQ ID NO: 1201 - protein, 15 aa, Phleum pratense
EAFDPYYGKISLSKV

SEQ ID NO: 1202 - protein, 15 aa, Phleum pratense
SKVRSFLTEAKAKHI

SEQ ID NO: 1203 - protein, 15 aa, Phleum pratense
LTEAKAKHIEWNCDV

SEQ ID NO: 1204 - protein, 15 aa, Phleum pratense
KEKRWNAALTSISAS

SEQ ID NO: 1205 - protein, 15 aa, Phleum pratense
GSAYVDLGSLLAERT

SEQ ID NO: 1206 - protein, 15 aa, Phleum pratense
RHLARQFIPHLHQRF

SEQ ID NO: 1207 - protein, 15 aa, Phleum pratense
FIPHLHQRFIHPPIH

SEQ ID NO: 1208 - protein, 15 aa, Phleum pratense
NTMENLSSTIFSFVI

SEQ ID NO: 1209 - protein, 15 aa, Phleum pratense
TIFSFVILLSASASL

SEQ ID NO: 1210 - protein, 15 aa, Phleum pratense
ILLSASASLVVAGDP

SEQ ID NO: 1211 - protein, 15 aa, Phleum pratense
ELAEMEVSAAFHLFS

SEQ ID NO: 1212 - protein, 15 aa, Phleum pratense
SAAFHLFSMAVTAAR

SEQ ID NO: 1213 - protein, 15 aa, Phleum pratense
FSMAVTAARSQQWND

SEQ ID NO: 1214 - protein, 15 aa, Phleum pratense
KISLSKVRSFLTEAK

SEQ ID NO: 1215 - protein, 15 aa, Phleum pratense
QQYTAALSPILFECL

SEQ ID NO: 1216 - protein, 15 aa, Phleum pratense
LSPILFECLIHPMLG

SEQ ID NO: 1217 - protein, 15 aa, Phleum pratense
VEDNLVKLKNVLNVY

SEQ ID NO: 1218 - protein, 15 aa, Phleum pratense
KLKNVLNVYEARLTK

SEQ ID NO: 1219 - protein, 15 aa, Phleum pratense
EVYEARLTKFKYLAG

SEQ ID NO: 1220 - protein, 15 aa, Phleum pratense
TKFKYLAGDYLSLAD

SEQ ID NO: 1221 - protein, 15 aa, Phleum pratense
AGDYLSLADLNHVST

SEQ ID NO: 1222 - protein, 15 aa, Phleum pratense
VKAWWTDLLAKPSVQ

SEQ ID NO: 1223 - protein, 15 aa, Phleum pratense
KLRFTCLSSTGSSCL

SEQ ID NO: 1224 - protein, 15 aa, Phleum pratense
LSSTGSSCLFVLILF

SEQ ID NO: 1225 - protein, 15 aa, Phleum pratense
EKLKKVLEVYEARLS

SEQ ID NO: 1226 - protein, 15 aa, Phleum pratense
SYLAGDFVSFADLNH

SEQ ID NO: 1227 - protein, 15 aa, Phleum pratense
FVSFADLNHFPKTFY

SEQ ID NO: 1228 - protein, 15 aa, Phleum pratense
FPKTFYFMATPHASL

SEQ ID NO: 1229 - protein, 15 aa, Phleum pratense
HVKAWWERIMARPAV

SEQ ID NO: 1230 - protein, 15 aa, Phleum pratense
IMARPAVKKIAAAMV

SEQ ID NO: 1231 - protein, 15 aa, Phleum pratense
KRKVRGFWRVHQISA

SEQ ID NO: 1232 - protein, 15 aa, Phleum pratense
FWRVHQISARMAPVK

SEQ ID NO: 1233 - protein, 15 aa, Phleum pratense
MAPVKLYGATLSWNV

SEQ ID NO: 1234 - protein, 15 aa, Phleum pratense
GDLYIFESRAICKYA

SEQ ID NO: 1235 - protein, 15 aa, Phleum pratense
EANQYTAALGPILFE

SEQ ID NO: 1236 - protein, 15 aa, Phleum pratense
ACSLFLNYAVSFNYF

SEQ ID NO: 1237 - protein, 15 aa, Phleum pratense
YAVSFNYFVCNLLQE

SEQ ID NO: 1238 - protein, 15 aa, Phleum pratense
NLLQERLKKLKSEHG

SEQ ID NO: 1239 - protein, 15 aa, Phleum pratense
GMTGMLWETSLLDPE

SEQ ID NO: 1240 - protein, 15 aa, Phleum pratense
PEGLLWLLLTGKVPT

SEQ ID NO: 1241 - protein, 15 aa, Phleum pratense
YVYKAIDALPVTAHP

SEQ ID NO: 1242 - protein, 15 aa, Phleum pratense
QFTTGVMALQVESEF

SEQ ID NO: 1243 - protein, 15 aa, Phleum pratense
EDCLNLIARLPQVAS

SEQ ID NO: 1244 - protein, 15 aa, Phleum pratense
IARLPQVASYVYRRI

SEQ ID NO: 1245 - protein, 15 aa, Phleum pratense
ADNSLDYAANFSHML

SEQ ID NO: 1246 - protein, 15 aa, Phleum pratense
DPKMLELMRLYITIH

SEQ ID NO: 1247 - protein, 15 aa, Phleum pratense
ALSDPYLSFAAALNG

SEQ ID NO: 1248 - protein, 15 aa, Phleum pratense
LSFAAALNGLAGPLH

SEQ ID NO: 1249 - protein, 15 aa, Phleum pratense
PLHGLANQEVLLWIK

SEQ ID NO: 1250 - protein, 15 aa, Phleum pratense
QEVLLWIKSVMEETG

SEQ ID NO: 1251 - protein, 15 aa, Phleum pratense
QLKEYVWKTLKSGKV

SEQ ID NO: 1252 - protein, 15 aa, Phleum pratense
EDPLFQLVSKLYEVV

SEQ ID NO: 1253 - protein, 15 aa, Phleum pratense
LVSKLYEVVPGILTE

SEQ ID NO: 1254 - protein, 15 aa, Phleum pratense
SGVLLNHFGLVEARY

SEQ ID NO: 1255 - protein, 15 aa, Phleum pratense
TVLFGVSRSMGIGSQ

SEQ ID NO: 1256 - protein, 15 aa, Phleum pratense
GSQLIWDRALGLPLE

SEQ ID NO: 1257 - protein, 15 aa, Phleum pratense
GPVTILNWSFVRNDQ

SEQ ID NO: 1258 - protein, 15 aa, Phleum pratense
PRFETCYQIALAIKK

SEQ ID NO: 1259 - protein, 15 aa, Phleum pratense
GIQVIQIDEAALREG

SEQ ID NO: 1260 - protein, 15 aa, Phleum pratense
EHAFYLDWAVHSFRI

SEQ ID NO: 1261 - protein, 15 aa, Phleum pratense
FNDIIHSIINMDADV

SEQ ID NO: 1262 - protein, 15 aa, Phleum pratense
SDEKLLSVFREGVTY

SEQ ID NO: 1263 - protein, 15 aa, Phleum pratense
VNKMLAVLDTNILWV

SEQ ID NO: 1264 - protein, 15 aa, Phleum pratense
TRKYAEVMPALTNMV

SEQ ID NO: 1265 - protein, 15 aa, Phleum pratense
PALTNMVTAAKLIRT

SEQ ID NO: 1266 - protein, 15 aa, Phleum pratense
VTAAKLIRTQLASTK

SEQ ID NO: 1267 - protein, 15 aa, Phleum pratense
GRGIKDEGLVVAPGQ

SEQ ID NO: 1268 - protein, 15 aa, Phleum pratense
LTVGNIIAGDRFSMA

SEQ ID NO: 1269 - protein, 15 aa, Phleum pratense
DRFSMAYDRTPEEIL

SEQ ID NO: 1270 - protein, 15 aa, Phleum pratense
YDRTPEEILAIVYGT

SEQ ID NO: 1271 - protein, 15 aa, Phleum pratense
EILAIVYGTGNPAQA

SEQ ID NO: 1272 - protein, 15 aa, Phleum pratense
TREENVYMAKLAEQA

SEQ ID NO: 1273 - protein, 15 aa, Phleum pratense
YEEMVEFMEKVAKTA

SEQ ID NO: 1274 - protein, 15 aa, Phleum pratense
EERNLLSVAYKNVIG

SEQ ID NO: 1275 - protein, 15 aa, Phleum pratense
AYKNVIGARRASWRI

SEQ ID NO: 1276 - protein, 15 aa, Phleum pratense
RRASWRIISSIEQKE

SEQ ID NO: 1277 - protein, 15 aa, Phleum pratense
NEAYVASIKEYRTRI

SEQ ID NO: 1278 - protein, 15 aa, Phleum pratense
SKICDGILKLLDSHL

SEQ ID NO: 1279 - protein, 15 aa, Phleum pratense
ILKLLDSHLVPSATA

SEQ ID NO: 1280 - protein, 15 aa, Phleum pratense
AESKVFYLKMKGDYH

SEQ ID NO: 1281 - protein, 15 aa, Phleum pratense
GDYHRYLAEFKAGAE

SEQ ID NO: 1282 - protein, 15 aa, Phleum pratense
NTLVAYKSAQDIALA

SEQ ID NO: 1283 - protein, 15 aa, Phleum pratense
LPTTHPIRLGLALNF

SEQ ID NO: 1284 - protein, 15 aa, Phleum pratense
IRLGLALNFSVFYYE

SEQ ID NO: 1285 - protein, 15 aa, Phleum pratense
LNFSVFYYEILNSPD

SEQ ID NO: 1286 - protein, 15 aa, Phleum pratense
YKDSTLIMQLLRDNL

SEQ ID NO: 1287 - protein, 15 aa, Phleum pratense
IMQLLRDNLTLWTSD

SEQ ID NO: 1288 - protein, 15 aa, Phleum pratense
GSRALPFLLQLTKQP

SEQ ID NO: 1289 - protein, 15 aa, Phleum pratense
VKVYVVYYSMYGHVG

SEQ ID NO: 1290 - protein, 15 aa, Phleum pratense
GVEVKVWQVPEILSE

SEQ ID NO: 1291 - protein, 15 aa, Phleum pratense
ADGILFGFPTRFGMM

SEQ ID NO: 1292 - protein, 15 aa, Phleum pratense
FHQGKYFAGIAKKLK

SEQ ID NO: 1293 - protein, 15 aa, Phleum pratense
DVYPTVCLPMCVCVL

SEQ ID NO: 1294 - protein, 15 aa, Phleum pratense
EPAYFATAESVRDHL

SEQ ID NO: 1295 - protein, 15 aa, Phleum pratense
QTYYLSMEYLQGRAL

SEQ ID NO: 1296 - protein, 15 aa, Phleum pratense
AVGNLGITGAYAEAV

SEQ ID NO: 1297 - protein, 15 aa, Phleum pratense
AEAVKKFGYELEALA

SEQ ID NO: 1298 - protein, 15 aa, Phleum pratense
RLAACFLDSMATLNL

SEQ ID NO: 1299 - protein, 15 aa, Phleum pratense
LRYRYGLFKQRIAKE

SEQ ID NO: 1300 - protein, 15 aa, Phleum pratense
FSPWEIVRHDVVYPV

SEQ ID NO: 1301 - protein, 15 aa, Phleum pratense
VYPVRFFGHVEILPD

SEQ ID NO: 1302 - protein, 15 aa, Phleum pratense
GEVLNALAYDVPIPG

SEQ ID NO: 1303 - protein, 15 aa, Phleum pratense
IPGYKTKNAISLRLW

SEQ ID NO: 1304 - protein, 15 aa, Phleum pratense
AEDFNLFQFNDGQYE

SEQ ID NO: 1305 - protein, 15 aa, Phleum pratense
EGKLLRLKQQFFLCS

SEQ ID NO: 1306 - protein, 15 aa, Phleum pratense
LKQQFFLCSASLQDI

SEQ ID NO: 1307 - protein, 15 aa, Phleum pratense
PTLAIPELMRLLMDE

SEQ ID NO: 1308 - protein, 15 aa, Phleum pratense
QSVMRKLLPRQMEII

SEQ ID NO: 1309 - protein, 15 aa, Phleum pratense
EEIDKRFREMVISTR

SEQ ID NO: 1310 - protein, 15 aa, Phleum pratense
PQKPVVRMANLCVVS

SEQ ID NO: 1311 - protein, 15 aa, Phleum pratense
ILKEELFADYVSIWP

SEQ ID NO: 1312 - protein, 15 aa, Phleum pratense
PRRWLRFCNPELSEI

SEQ ID NO: 1313 - protein, 15 aa, Phleum pratense
EKLHAEWAAAKLASK

SEQ ID NO: 1314 - protein, 15 aa, Phleum pratense
IKRIHEYKRQLMNIL

SEQ ID NO: 1315 - protein, 15 aa, Phleum pratense
YKRQLMNILGAVYRY

SEQ ID NO: 1316 - protein, 15 aa, Phleum pratense
LGAVYRYKKLKEMSA

SEQ ID NO: 1317 - protein, 15 aa, Phleum pratense
GKAFATYTNAKRIVK

SEQ ID NO: 1318 - protein, 15 aa, Phleum pratense
KRIVKLVNDVGAVVN

SEQ ID NO: 1319 - protein, 15 aa, Phleum pratense
VNKYLKVVFIPNYNV

SEQ ID NO: 1320 - protein, 15 aa, Phleum pratense
VFIPNYNVSVAEVLI

SEQ ID NO: 1321 - protein, 15 aa, Phleum pratense
EDNFFLFGAKADQVA

SEQ ID NO: 1322 - protein, 15 aa, Phleum pratense
TFGTYDYTPLLDSLE

SEQ ID NO: 1323 - protein, 15 aa, Phleum pratense
FLVGYDFPSYIDAQA

SEQ ID NO: 1324 - protein, 15 aa, Phleum pratense
KRWIKMSILNTAGSG

SEQ ID NO: 1325 - protein, 15 aa, Phleum pratense
QYAKEIWGITANPVP

SEQ ID NO: 1326 - protein, 15 aa, Phleum pratense
KTLAVALGGARPLAT

SEQ ID NO: 1327 - protein, 15 aa, Phleum pratense
LATRGVATFTLPDLP

SEQ ID NO: 1328 - protein, 15 aa, Phleum pratense
PDLPYDYGALEPAIS

SEQ ID NO: 1329 - protein, 15 aa, Phleum pratense
HATYVANYNKALEQL

SEQ ID NO: 1330 - protein, 15 aa, Phleum pratense
GDASAVVQLQGAIKF

SEQ ID NO: 1331 - protein, 15 aa, Phleum pratense
DPLVTKGANLIPLLG

SEQ ID NO: 1332 - protein, 15 aa, Phleum pratense
ANLIPLLGIDVWEHA

SEQ ID NO: 1333 - protein, 15 aa, Phleum pratense
HAYYLQYKNVRPDYL

SEQ ID NO: 1334 - protein, 15 aa, Phleum pratense
PDYLTNIWKVVNWKY

SEQ ID NO: 1335 - protein, 15 aa, Phleum pratense
APSGRIVMELYADVV

SEQ ID NO: 1336 - protein, 15 aa, Phleum pratense
VMELYADVVPKTAEN

SEQ ID NO: 1337 - protein, 15 aa, Phleum pratense
HYKGSSFHRVIPGFM

SEQ ID NO: 1338 - protein, 15 aa, Phleum pratense
SIYGAKFADENFIKK

SEQ ID NO: 1339 - protein, 15 aa, Phleum pratense
NGSQFFLCTAKTAWL

SEQ ID NO: 1340 - protein, 15 aa, Phleum pratense
SQVHIRRPGGAGRDG

SEQ ID NO: 1341 - protein, 15 aa, Phleum pratense
RPGGAGRDGGQLRIP

SEQ ID NO: 1342 - protein, 15 aa, Phleum pratense
RDGGQLRIPSLLHGG

SEQ ID NO: 1343 - protein, 15 aa, Phleum pratense
GHGCAQPAMERRKHI

SEQ ID NO: 1344 - protein, 15 aa, Phleum pratense
RKHIEWNCDVCRHGD

SEQ ID NO: 1345 - protein, 15 aa, Phleum pratense
WTTVMRASCGHHRFR

SEQ ID NO: 1346 - protein, 15 aa, Phleum pratense
RFRDCVISSLADFKL

SEQ ID NO: 1347 - protein, 15 aa, Phleum pratense
ISSLADFKLFPVLQH

SEQ ID NO: 1348 - protein, 15 aa, Phleum pratense
PVLQHIISIAVLAIF

SEQ ID NO: 1349 - protein, 15 aa, Phleum pratense
ISIAVLAIFIGLLMI

SEQ ID NO: 1350 - protein, 15 aa, Phleum pratense
DEKLLSVFREGVVYG

SEQ ID NO: 1351 - protein, 15 aa, Phleum pratense
GPGVYDIHSPRIPSK

SEQ ID NO: 1352 - protein, 15 aa, Phleum pratense
EEIADDFALFRGTRP

SEQ ID NO: 1353 - protein, 15 aa, Phleum pratense
FALFRGTRPPRRPKK

SEQ ID NO: 1354 - protein, 15 aa, Phleum pratense
LCPGFCLADVTPETY

SEQ ID NO: 1355 - protein, 15 aa, Phleum pratense
SCRGRCPCSLRTPAW

SEQ ID NO: 1356 - protein, 15 aa, Phleum pratense
SLRTPAWGSCSRMAP

SEQ ID NO: 1357 - protein, 15 aa, Phleum pratense
WGSCSRMAPCNCRCP

SEQ ID NO: 1358 - protein, 15 aa, Phleum pratense
NCRCPCSTRGARRRL

SEQ ID NO: 1359 - protein, 15 aa, Phleum pratense
STRGARRRLPGRTSS

SEQ ID NO: 1360 - protein, 15 aa, Phleum pratense
PWRPPRRWSCCPLPW

SEQ ID NO: 1361 - protein, 15 aa, Phleum pratense
SCCPLPWPGTRRWWF

SEQ ID NO: 1362 - protein, 15 aa, Phleum pratense
GTRRWWFRCHQPPSS

SEQ ID NO: 1363 - protein, 15 aa, Phleum pratense
FRCHQPPSSRTAPGS

SEQ ID NO: 1364 - protein, 15 aa, Phleum pratense
PGSSRSLYGSPSTSC

SEQ ID NO: 1365 - protein, 15 aa, Phleum pratense
KHLIYVTGWSVYTEI

SEQ ID NO: 1366 - protein, 15 aa, Phleum pratense
TGWSVYTEITLLRDA

SEQ ID NO: 1367 - protein, 15 aa, Phleum pratense
SEGVRVLMLVWDDRT

SEQ ID NO: 1368 - protein, 15 aa, Phleum pratense
DDSGSIVQDLQISTM

SEQ ID NO: 1369 - protein, 15 aa, Phleum pratense
LQISTMFTHHQKIVV

SEQ ID NO: 1370 - protein, 15 aa, Phleum pratense
RRRRIMSFVGGLDLC

SEQ ID NO: 1371 - protein, 15 aa, Phleum pratense
PVAWDVLYNFEQRWR

SEQ ID NO: 1372 - protein, 15 aa, Phleum pratense
GKDLLIQLRDLADEI

SEQ ID NO: 1373 - protein, 15 aa, Phleum pratense
AWNVQLFRSIDGGAA

SEQ ID NO: 1374 - protein, 15 aa, Phleum pratense
DAYICAIRRAKSFIY

SEQ ID NO: 1375 - protein, 15 aa, Phleum pratense
IRRAKSFIYIENQYF

SEQ ID NO: 1376 - protein, 15 aa, Phleum pratense
FIYIENQYFLGSSYC

SEQ ID NO: 1377 - protein, 15 aa, Phleum pratense
RFTVYVVVPMWPEGI

SEQ ID NO: 1378 - protein, 15 aa, Phleum pratense
RRTMEMMYTDIAQAI

SEQ ID NO: 1379 - protein, 15 aa, Phleum pratense
MYTDIAQAIQAKGID

SEQ ID NO: 1380 - protein, 15 aa, Phleum pratense
DYLKAQQNRRFMIYV

SEQ ID NO: 1381 - protein, 15 aa, Phleum pratense
FMIYVHTKMMIVDDE

SEQ ID NO: 1382 - protein, 15 aa, Phleum pratense
IVDDEYIIVGSANIN

SEQ ID NO: 1383 - protein, 15 aa, Phleum pratense
YQPYHLAASRPARGQ

SEQ ID NO: 1384 - protein, 15 aa, Phleum pratense
GQVHGFRMALWYEHL

SEQ ID NO: 1385 - protein, 15 aa, Phleum pratense
RMALWYEHLGMVDEA

SEQ ID NO: 1386 - protein, 15 aa, Phleum pratense
CVRKVNAMADRYWNL

SEQ ID NO: 1387 - protein, 15 aa, Phleum pratense
LPGVEFFPDTQARIL

SEQ ID NO: 1388 - protein, 15 aa, Phleum pratense
TAPTSRRSPSAPSPH

SEQ ID NO: 1389 - protein, 15 aa, Phleum pratense
TRTCISTRRIPSRPT

SEQ ID NO: 1390 - protein, 15 aa, Phleum pratense
PWSTCRAARSPTPSA

SEQ ID NO: 1391 - protein, 15 aa, Phleum pratense
DRREIWLSEMVAWVG

SEQ ID NO: 1392 - protein, 15 aa, Phleum pratense
SEMVAWVGLQLAFWI

SEQ ID NO: 1393 - protein, 15 aa, Phleum pratense
VKVAPAALVNVLEAR

SEQ ID NO: 1394 - protein, 15 aa, Phleum pratense
LVNVLEARSALTISV

SEQ ID NO: 1395 - protein, 15 aa, Phleum pratense
ARSALTISVLRISSM

SEQ ID NO: 1396 - protein, 15 aa, Phleum pratense
ISVLRISSMPFSVYH

SEQ ID NO: 1397 - protein, 15 aa, Phleum pratense
LAAFWGKRYPLLSAG

SEQ ID NO: 1398 - protein, 15 aa, Phleum pratense
SSPSCAPESTHAVRA

SEQ ID NO: 1399 - protein, 15 aa, Phleum pratense
PESTHAVRALPSTHT

SEQ ID NO: 1400 - protein, 15 aa, Phleum pratense
VRALPSTHTARILLR

SEQ ID NO: 1401 - protein, 15 aa, Phleum pratense
THTARILLRSTTANV

SEQ ID NO: 1402 - protein, 15 aa, Phleum pratense
LLRSTTANVSGCKDR

SEQ ID NO: 1403 - protein, 15 aa, Phleum pratense
VQVPGGHQGDLPRGE

SEQ ID NO: 1404 - protein, 15 aa, Phleum pratense
LPGAAGEVCRRRRRR

SEQ ID NO: 1405 - protein, 15 aa, Phleum pratense
GQGQVDRAQGVVGSH

SEQ ID NO: 1406 - protein, 15 aa, Phleum pratense
GVVGSHLEDRHSRQA

SEQ ID NO: 1407 - protein, 15 aa, Phleum pratense
LEDRHSRQAHRPLHR

SEQ ID NO: 1408 - protein, 15 aa, Phleum pratense
HTFKSLFESWPVSST

SEQ ID NO: 1409 - protein, 15 aa, Phleum pratense
DCYIVLYTYHSGEKR

SEQ ID NO: 1410 - protein, 15 aa, Phleum pratense
FYLTYWIGKDSVLED

SEQ ID NO: 1411 - protein, 15 aa, Phleum pratense
QHMALQIATTIWNSM

SEQ ID NO: 1412 - protein, 15 aa, Phleum pratense
EPPQFIALFQPMVIL

SEQ ID NO: 1413 - protein, 15 aa, Phleum pratense
KDETYSGTGIALVHI

SEQ ID NO: 1414 - protein, 15 aa, Phleum pratense
GTGIALVHIHGTSIH

SEQ ID NO: 1415 - protein, 15 aa, Phleum pratense
NNKTLQVDAVSISLS

SEQ ID NO: 1416 - protein, 15 aa, Phleum pratense
TDCFVLQSGNSMFTW

SEQ ID NO: 1417 - protein, 15 aa, Phleum pratense
QQQWAAKVAEFLKPG

SEQ ID NO: 1418 - protein, 15 aa, Phleum pratense
DVLREPHLYTFSFRN

SEQ ID NO: 1419 - protein, 15 aa, Phleum pratense
LEVTEVFNFSQDDLL

SEQ ID NO: 1420 - protein, 15 aa, Phleum pratense
FNFSQDDLLTEDVMI

SEQ ID NO: 1421 - protein, 15 aa, Phleum pratense
DVMILDTHAEVFVWM

SEQ ID NO: 1422 - protein, 15 aa, Phleum pratense
CFFRTYFSWDNTRSV

SEQ ID NO: 1423 - protein, 15 aa, Phleum pratense
NSFQKKLSLLFGMRS

SEQ ID NO: 1424 - protein, 15 aa, Phleum pratense
RASALAALSSAFNPS

SEQ ID NO: 1425 - protein, 15 aa, Phleum pratense
QRASALAALSSSLNP

SEQ ID NO: 1426 - protein, 15 aa, Phleum pratense
SQRAAAVAALSNVLT

SEQ ID NO: 1427 - protein, 15 aa, Phleum pratense
VAALSNVLTAEGSTL

SEQ ID NO: 1428 - protein, 15 aa, Phleum pratense
ETTFSYDRLISKSTD

SEQ ID NO: 1429 - protein, 15 aa, Phleum pratense
YKRRETYLSDSEFET

SEQ ID NO: 1430 - protein, 15 aa, Phleum pratense
SEFETVFGVTKEEFY

SEQ ID NO: 1431 - protein, 15 aa, Phleum pratense
SRSFLKHSLLRTQRL

SEQ ID NO: 1432 - protein, 15 aa, Phleum pratense
HSLLRTQRLHKFLVC

SEQ ID NO: 1433 - protein, 15 aa, Phleum pratense
LHKFLVCSSMIGVMA

SEQ ID NO: 1434 - protein, 15 aa, Phleum pratense
SGNLVMFQMQDHQLI

SEQ ID NO: 1435 - protein, 15 aa, Phleum pratense
QLIYPLISPSFLVYS

SEQ ID NO: 1436 - protein, 15 aa, Phleum pratense
ISPSFLVYSFFVHDL

SEQ ID NO: 1437 - protein, 15 aa, Phleum pratense
ERLIYQTANSRLCSV

SEQ ID NO: 1438 - protein, 15 aa, Phleum pratense
ANSRLCSVLPKEEFY

SEQ ID NO: 1439 - protein, 15 aa, Phleum pratense
VLPKEEFYQQPRWKQ

SEQ ID NO: 1440 - protein, 15 aa, Phleum pratense
FYQQPRWKQELQKRK

SEQ ID NO: 1441 - protein, 15 aa, Phleum pratense
TGAAAAMTTTIRSTA

SEQ ID NO: 1442 - protein, 15 aa, Phleum pratense
TTIRSTATARPRAIV

SEQ ID NO: 1443 - protein, 15 aa, Phleum pratense
SDGTFARAAVPSGAS

SEQ ID NO: 1444 - protein, 15 aa, Phleum pratense
RAAVPSGASTGVYEA

SEQ ID NO: 1445 - protein, 15 aa, Phleum pratense
GASTGVYEALELRDG

SEQ ID NO: 1446 - protein, 15 aa, Phleum pratense
LGKGVLKGNRANVEL

SEQ ID NO: 1447 - protein, 15 aa, Phleum pratense
NRANVELFHIAVLLA

SEQ ID NO: 1448 - protein, 15 aa, Phleum pratense
QTELDNFMVHQLDGT

SEQ ID NO: 1449 - protein, 15 aa, Phleum pratense
CKQKVFFNISADADA

SEQ ID NO: 1450 - protein, 15 aa, Phleum pratense
PAMAATIQSVKARQI

SEQ ID NO: 1451 - protein, 15 aa, Phleum pratense
VDNVNSIIGPALIGK

SEQ ID NO: 1452 - protein, 15 aa, Phleum pratense
KLGANAILAVSLAVC

SEQ ID NO: 1453 - protein, 15 aa, Phleum pratense
KKIPLYQHIANLAGN

SEQ ID NO: 1454 - protein, 15 aa, Phleum pratense
GNKQLVLPVPAFNVI

SEQ ID NO: 1455 - protein, 15 aa, Phleum pratense
KLAMQEFMILPTGAS

SEQ ID NO: 1456 - protein, 15 aa, Phleum pratense
KMGVEVYHNLKSVIK

SEQ ID NO: 1457 - protein, 15 aa, Phleum pratense
GKVVIGMDVAASEFY

SEQ ID NO: 1458 - protein, 15 aa, Phleum pratense
VYKSFVSEYPIVSIE

SEQ ID NO: 1459 - protein, 15 aa, Phleum pratense
IVGDDLLVTNPTRVA

SEQ ID NO: 1460 - protein, 15 aa, Phleum pratense
NALLLKVNQIGSVTE

SEQ ID NO: 1461 - protein, 15 aa, Phleum pratense
ETEDTFIADLAVGLS

SEQ ID NO: 1462 - protein, 15 aa, Phleum pratense
ERLAKYNQLLRIEEE

SEQ ID NO: 1463 - protein, 15 aa, Phleum pratense
LGAAAVYAGLKFRAP

SEQ ID NO: 1464 - protein, 15 aa, Phleum pratense
AEFEGVFLDFARQQA

SEQ ID NO: 1465 - protein, 15 aa, Phleum pratense
VDKLFKLAEAAKLKE

SEQ ID NO: 1466 - protein, 15 aa, Phleum pratense
ENRSVLHVALRAPRD

SEQ ID NO: 1467 - protein, 15 aa, Phleum pratense
FLGPLFVHTALQTDP

SEQ ID NO: 1468 - protein, 15 aa, Phleum pratense
RQLRFLANVDPVDVA

SEQ ID NO: 1469 - protein, 15 aa, Phleum pratense
VVSKTFTTAETMLNA

SEQ ID NO: 1470 - protein, 15 aa, Phleum pratense
IKEWIVSSLGPQAVS

SEQ ID NO: 1471 - protein, 15 aa, Phleum pratense
VSKHMIAVSTNLKLV

SEQ ID NO: 1472 - protein, 15 aa, Phleum pratense
RYSVCSAVGVLPLSL

SEQ ID NO: 1473 - protein, 15 aa, Phleum pratense
AVGVLPLSLQYGFPI

SEQ ID NO: 1474 - protein, 15 aa, Phleum pratense
LSLQYGFPIVQRFLE

SEQ ID NO: 1475 - protein, 15 aa, Phleum pratense
FPIVQRFLEGASSID

SEQ ID NO: 1476 - protein, 15 aa, Phleum pratense
HFRTASFEKNIPVLL

SEQ ID NO: 1477 - protein, 15 aa, Phleum pratense
VLLGLLSVWNVSFLG

SEQ ID NO: 1478 - protein, 15 aa, Phleum pratense
SVWNVSFLGYPARAI

SEQ ID NO: 1479 - protein, 15 aa, Phleum pratense
ARAILPYSQALEKLA

SEQ ID NO: 1480 - protein, 15 aa, Phleum pratense
NGQHSFYQLIHQGRV

SEQ ID NO: 1481 - protein, 15 aa, Phleum pratense
CDFIGVIKSQQPVYL

SEQ ID NO: 1482 - protein, 15 aa, Phleum pratense
ELMSNFFAQPDALAY

SEQ ID NO: 1483 - protein, 15 aa, Phleum pratense
KTFKGNRPSLSFLLS

SEQ ID NO: 1484 - protein, 15 aa, Phleum pratense
PSLSFLLSSLSAYEI

SEQ ID NO: 1485 - protein, 15 aa, Phleum pratense
AYEIGQLLAIYEHRI

SEQ ID NO: 1486 - protein, 15 aa, Phleum pratense
LLAIYEHRIAVQGFI

SEQ ID NO: 1487 - protein, 15 aa, Phleum pratense
QGFIWGINSFDQWGV

SEQ ID NO: 1488 - protein, 15 aa, Phleum pratense
PVEGFNPSSASLLAR

SEQ ID NO: 1489 - protein, 15 aa, Phleum pratense
PSSASLLARYLAVEP

SEQ ID NO: 1490 - protein, 15 aa, Phleum pratense
ILLVFAETAEPEVKV

SEQ ID NO: 1491 - protein, 15 aa, Phleum pratense
EPEVKVVDLTILSPD

SEQ ID NO: 1492 - protein, 15 aa, Phleum pratense
LKDGSTYSFRFSFIV

SEQ ID NO: 1493 - protein, 15 aa, Phleum pratense
SFRFSFIVSNNIVSG

SEQ ID NO: 1494 - protein, 15 aa, Phleum pratense
DDGKVYLEMSYYFEI

SEQ ID NO: 1495 - protein, 15 aa, Phleum pratense
MKTIFDFESIKKLLA

SEQ ID NO: 1496 - protein, 15 aa, Phleum pratense
FESIKKLLASPKFSF

SEQ ID NO: 1497 - protein, 15 aa, Phleum pratense
RMFVDELGASESSLL

SEQ ID NO: 1498 - protein, 15 aa, Phleum pratense
PNLTYAKELVERMGL

SEQ ID NO: 1499 - protein, 15 aa, Phleum pratense
RNMVLGKRFFVTPSD

SEQ ID NO: 1500 - protein, 15 aa, Phleum pratense
KRFFVTPSDSVAIIA

SEQ ID NO: 1501 - protein, 15 aa, Phleum pratense
SDSVAIIAANAVQSI

SEQ ID NO: 1502 - protein, 15 aa, Phleum pratense
AVQSIPYFASGLKGV

SEQ ID NO: 1503 - protein, 15 aa, Phleum pratense
KNLNLKFFEVPTGWK

SEQ ID NO: 1504 - protein, 15 aa, Phleum pratense
GIWAVLAWLSIIAYK

SEQ ID NO: 1505 - protein, 15 aa, Phleum pratense
NLGGDKLVSVEDIVL

SEQ ID NO: 1506 - protein, 15 aa, Phleum pratense
LVSVEDIVLQHWATY

SEQ ID NO: 1507 - protein, 15 aa, Phleum pratense
KELMANLVKMQSALS

SEQ ID NO: 1508 - protein, 15 aa, Phleum pratense
LVKMQSALSDVNKLI

SEQ ID NO: 1509 - protein, 15 aa, Phleum pratense
HQGIRYLFGDGSRLV

SEQ ID NO: 1510 - protein, 15 aa, Phleum pratense
SRLVFRLSGTGSVGA

SEQ ID NO: 1511 - protein, 15 aa, Phleum pratense
GATIRIYIEQYEKDS

SEQ ID NO: 1512 - protein, 15 aa, Phleum pratense
DALSPLVDVALKLSK

SEQ ID NO: 1513 - protein, 15 aa, Phleum pratense
TVSDEYLAAVAKARR

SEQ ID NO: 1514 - protein, 15 aa, Phleum pratense
LDIAVRLLEPIKEQV

SEQ ID NO: 1515 - protein, 15 aa, Phleum pratense
IKEQVPILSYADFYQ

SEQ ID NO: 1516 - protein, 15 aa, Phleum pratense
ILSYADFYQLAGVVA

SEQ ID NO: 1517 - protein, 15 aa, Phleum pratense
FYQLAGVVAVEITGG

SEQ ID NO: 1518 - protein, 15 aa, Phleum pratense
DHLRQVFTAQMGLSD

SEQ ID NO: 1519 - protein, 15 aa, Phleum pratense
NPLIFDNSYFTELLT

SEQ ID NO: 1520 - protein, 15 aa, Phleum pratense
EDAFFADYAEAHLKL

SEQ ID NO: 1521 - protein, 15 aa, Phleum pratense
TLLFPHTQISLPSVR

SEQ ID NO: 1522 - protein, 15 aa, Phleum pratense
VRTRKHLAATMADEK

SEQ ID NO: 1523 - protein, 15 aa, Phleum pratense
DNEKSGFISLVSRYL

SEQ ID NO: 1524 - protein, 15 aa, Phleum pratense
FISLVSRYLSGEEEH

SEQ ID NO: 1525 - protein, 15 aa, Phleum pratense
EATKALLNKLAVLKL

SEQ ID NO: 1526 - protein, 15 aa, Phleum pratense
IEVRNGFTFLDLIVL

SEQ ID NO: 1527 - protein, 15 aa, Phleum pratense
FLDLIVLQIESLNKK

SEQ ID NO: 1528 - protein, 15 aa, Phleum pratense
LNKKYGSNVPLLLMN

SEQ ID NO: 1529 - protein, 15 aa, Phleum pratense
NVPLLLMNSFNTHED

SEQ ID NO: 1530 - protein, 15 aa, Phleum pratense
LKIVEKYANSSIDIH

SEQ ID NO: 1531 - protein, 15 aa, Phleum pratense
SIDIHTFNQSQYPRV

SEQ ID NO: 1532 - protein, 15 aa, Phleum pratense
GKLDLLLSQGKEYVF

SEQ ID NO: 1533 - protein, 15 aa, Phleum pratense
GKEYVFIANSDNLGA

SEQ ID NO: 1534 - protein, 15 aa, Phleum pratense
SDNLGAIVDMKILNH

SEQ ID NO: 1535 - protein, 15 aa, Phleum pratense
IVDMKILNHLIHKQN

SEQ ID NO: 1536 - protein, 15 aa, Phleum pratense
ISYEGRVQLLEIAQV

SEQ ID NO: 1537 - protein, 15 aa, Phleum pratense
VQLLEIAQVPDAHVD

SEQ ID NO: 1538 - protein, 15 aa, Phleum pratense
FKSIEKFKIFNTNNL

SEQ ID NO: 1539 - protein, 15 aa, Phleum pratense
FKIFNTNNLWVNLKA

SEQ ID NO: 1540 - protein, 15 aa, Phleum pratense
NNLWVNLKAIKRLVE

SEQ ID NO: 1541 - protein, 15 aa, Phleum pratense
IKRLVEADALKMEII

SEQ ID NO: 1542 - protein, 15 aa, Phleum pratense
VKVLQLETAAGAAIR

SEQ ID NO: 1543 - protein, 15 aa, Phleum pratense
AAIRFFDHAIGINVP

SEQ ID NO: 1544 - protein, 15 aa, Phleum pratense
GINVPRSRFLPVKAT

SEQ ID NO: 1545 - protein, 15 aa, Phleum pratense
RFLPVKATSDLQLVQ

SEQ ID NO: 1546 - protein, 15 aa, Phleum pratense
TSDLQLVQSDLYTLV

SEQ ID NO: 1547 - protein, 15 aa, Phleum pratense
VQSDLYTLVDGFVTR

SEQ ID NO: 1548 - protein, 15 aa, Phleum pratense
GPEFKKVGSFLGRFK

SEQ ID NO: 1549 - protein, 15 aa, Phleum pratense
GRFKSIPSIVELDSL

SEQ ID NO: 1550 - protein, 15 aa, Phleum pratense
GTIRNIINGTVFREP

SEQ ID NO: 1551 - protein, 15 aa, Phleum pratense
VFNFTGAGGVALAMY

SEQ ID NO: 1552 - protein, 15 aa, Phleum pratense
IQGFAEASMAIAYEK

SEQ ID NO: 1553 - protein, 15 aa, Phleum pratense
ASMAIAYEKKWPLYL

SEQ ID NO: 1554 - protein, 15 aa, Phleum pratense
EKKWPLYLSTKNTIL

SEQ ID NO: 1555 - protein, 15 aa, Phleum pratense
GRFKDIFQAVYEADW

SEQ ID NO: 1556 - protein, 15 aa, Phleum pratense
WYEHRLIDDMVAYAL

SEQ ID NO: 1557 - protein, 15 aa, Phleum pratense
VQSDFLAQGFGSLGL

SEQ ID NO: 1558 - protein, 15 aa, Phleum pratense
NSIASIFAWTRGLAH

SEQ ID NO: 1559 - protein, 15 aa, Phleum pratense
DNARLLDFTQKLEDA

SEQ ID NO: 1560 - protein, 15 aa, Phleum pratense
MTKDLALLVHGSSKV

SEQ ID NO: 1561 - protein, 15 aa, Phleum pratense
LNTEEFIDAVAAELQ

SEQ ID NO: 1562 - protein, 15 aa, Phleum pratense
ALTHTTIVASGIENM

SEQ ID NO: 1563 - protein, 15 aa, Phleum pratense
TIVASGIENMKIFTR

SEQ ID NO: 1564 - protein, 15 aa, Phleum pratense
MKIFTRTWVLLLLVV

SEQ ID NO: 1565 - protein, 15 aa, Phleum pratense
LLLLVVLLFEGCLAK

SEQ ID NO: 1566 - protein, 15 aa, Phleum pratense
KDTHYTLSAWLQLSK

SEQ ID NO: 1567 - protein, 15 aa, Phleum pratense
GKGELFFETNVTAEL

SEQ ID NO: 1568 - protein, 15 aa, Phleum pratense
VTAELMVDSMSLQPF

SEQ ID NO: 1569 - protein, 15 aa, Phleum pratense
YEKWFTSRFTVATME

SEQ ID NO: 1570 - protein, 15 aa, Phleum pratense
KQMDWVSKLSAPQLK

SEQ ID NO: 1571 - protein, 15 aa, Phleum pratense
KPILFMNEYNTIEEP

SEQ ID NO: 1572 - protein, 15 aa, Phleum pratense
TKYLAKLKQIQSYPG

SEQ ID NO: 1573 - protein, 15 aa, Phleum pratense
PYVRGSLDTLAQAKV

SEQ ID NO: 1574 - protein, 15 aa, Phleum pratense
PKQVEYLEEVMREGF

SEQ ID NO: 1575 - protein, 15 aa, Phleum pratense
NVTAELVDSMSLQPF

SEQ ID NO: 1576 - protein, 15 aa, Phleum pratense
TDTIVYCAGRTFFFR

SEQ ID NO: 1577 - protein, 15 aa, Phleum pratense
GRTFFFRRLDAPLDA

SEQ ID NO: 1578 - protein, 15 aa, Phleum pratense
KSLVRAFMWDSGSTV

SEQ ID NO: 1579 - protein, 15 aa, Phleum pratense
RVLSCDFKPTRPFRI

SEQ ID NO: 1580 - protein, 15 aa, Phleum pratense
HTGSIYAVSWSADSK

SEQ ID NO: 1581 - protein, 15 aa, Phleum pratense
AGHLKTVSSLTYFPQ

SEQ ID NO: 1582 - protein, 15 aa, Phleum pratense
VSSLTYFPQSNPRTM

SEQ ID NO: 1583 - protein, 15 aa, Phleum pratense
SYDGVIIRWIQGVGY

SEQ ID NO: 1584 - protein, 15 aa, Phleum pratense
TQIKCFVAAEEELIT

SEQ ID NO: 1585 - protein, 15 aa, Phleum pratense
NALNIAVQQPEFALI

SEQ ID NO: 1586 - protein, 15 aa, Phleum pratense
PEFALITTDSAIVLL

SEQ ID NO: 1587 - protein, 15 aa, Phleum pratense
TDSAIVLLHKSTVTS

SEQ ID NO: 1588 - protein, 15 aa, Phleum pratense
TKVSYTITSSAVSPD

SEQ ID NO: 1589 - protein, 15 aa, Phleum pratense
KLRIYSISGDTLTEE

SEQ ID NO: 1590 - protein, 15 aa, Phleum pratense
IHYSPDVSMFASADA

SEQ ID NO: 1591 - protein, 15 aa, Phleum pratense
IKLKNMLFHTARINC

SEQ ID NO: 1592 - protein, 15 aa, Phleum pratense
GRYFSKDAVQIITKM

SEQ ID NO: 1593 - protein, 15 aa, Phleum pratense
DAVQIITKMAAANGV

SEQ ID NO: 1594 - protein, 15 aa, Phleum pratense
GVRRVWVGQDSLLST

SEQ ID NO: 1595 - protein, 15 aa, Phleum pratense
SLLSTPAVSAIIRER

SEQ ID NO: 1596 - protein, 15 aa, Phleum pratense
AVSAIIRERIAADGS

SEQ ID NO: 1597 - protein, 15 aa, Phleum pratense
SVGFVETLENDLAQL

SEQ ID NO: 1598 - protein, 15 aa, Phleum pratense
LGEAPYKFKSALEAV

SEQ ID NO: 1599 - protein, 15 aa, Phleum pratense
KFKSALEAVKTLRAE

SEQ ID NO: 1600 - protein, 15 aa, Phleum pratense
QYLPAFVIVDESGKS

SEQ ID NO: 1601 - protein, 15 aa, Phleum pratense
VVTFNFRADRMVMLA

SEQ ID NO: 1602 - protein, 15 aa, Phleum pratense
ADRMVMLAKALEFAD

SEQ ID NO: 1603 - protein, 15 aa, Phleum pratense
FDKFDRVRVPKIKYA

SEQ ID NO: 1604 - protein, 15 aa, Phleum pratense
PKIKYAGMLQYDGEL

SEQ ID NO: 1605 - protein, 15 aa, Phleum pratense
LKLPNKFLVSPPLIE

SEQ ID NO: 1606 - protein, 15 aa, Phleum pratense
YKLLCSSFPVITYHQ

SEQ ID NO: 1607 - protein, 15 aa, Phleum pratense
FPVITYHQGRNGNLS

SEQ ID NO: 1608 - protein, 15 aa, Phleum pratense
RNGNLSALACPLNQK

SEQ ID NO: 1609 - protein, 15 aa, Phleum pratense
ECILSGLLSVDGLKV

SEQ ID NO: 1610 - protein, 15 aa, Phleum pratense
LLSVDGLKVLHMDRN

SEQ ID NO: 1611 - protein, 15 aa, Phleum pratense
VPKFMMANGALVRVL

SEQ ID NO: 1612 - protein, 15 aa, Phleum pratense
VRVLIRTSVTKYLNF

SEQ ID NO: 1613 - protein, 15 aa, Phleum pratense
TKYLNFKAVDGSFVY

SEQ ID NO: 1614 - protein, 15 aa, Phleum pratense
TDVEALKSNLMGLFE

SEQ ID NO: 1615 - protein, 15 aa, Phleum pratense
EKRRARKFFIYVQDY

SEQ ID NO: 1616 - protein, 15 aa, Phleum pratense
KFFIYVQDYEEEDPK

SEQ ID NO: 1617 - protein, 15 aa, Phleum pratense
TVDFIGHALALHRDD

SEQ ID NO: 1618 - protein, 15 aa, Phleum pratense
VKRMKLYAESLARFQ

SEQ ID NO: 1619 - protein, 15 aa, Phleum pratense
GELPQAFARLSAVYG

SEQ ID NO: 1620 - protein, 15 aa, Phleum pratense
FARLSAVYGGTYMLN

SEQ ID NO: 1621 - protein, 15 aa, Phleum pratense
KGKFIAFVSTEAETD

SEQ ID NO: 1622 - protein, 15 aa, Phleum pratense
ETTVKDVLALYSKIT

SEQ ID NO: 1623 - protein, 15 aa, Phleum pratense
LDLSVDLNAASAGES

SEQ ID NO: 1624 - protein, 15 aa, Phleum pratense
LLGYLLWVVAIRRPR

SEQ ID NO: 1625 - protein, 15 aa, Phleum pratense
WVVAIRRPRPVRCFS

SEQ ID NO: 1626 - protein, 15 aa, Phleum pratense
PRVNFFKRYNLTCVF

SEQ ID NO: 1627 - protein, 15 aa, Phleum pratense
KRYNLTCVFWSKKKK

SEQ ID NO: 1628 - protein, 15 aa, Phleum pratense
DEKLLSVFREGVVYG

SEQ ID NO: 1629 - protein, 15 aa, Phleum pratense
GPGVYDIHSPRIPSK

SEQ ID NO: 1630 - protein, 15 aa, Phleum pratense
EEIADDFALFRGTRP

SEQ ID NO: 1631 - protein, 15 aa, Phleum pratense
FALFRGTRPPRRPKK

SEQ ID NO: 1632 - protein, 15 aa, Phleum pratense
LCPGFCLADVTPETY

SEQ ID NO: 1633 - protein, 15 aa, Phleum pratense
VCTRLSPFCCLYCIL

SEQ ID NO: 1634 - protein, 15 aa, Phleum pratense
YCILCCWYSMRLVTV

SEQ ID NO: 1635 - protein, 15 aa, Phleum pratense
NIPATWGAMEKLYDA

SEQ ID NO: 1636 - protein, 15 aa, Phleum pratense
GAMEKLYDAGKARAI

SEQ ID NO: 1637 - protein, 15 aa, Phleum pratense
KARAIGVSNLASKKL

SEQ ID NO: 1638 - protein, 15 aa, Phleum pratense
VSNLASKKLGDLLAV

SEQ ID NO: 1639 - protein, 15 aa, Phleum pratense
KKLGDLLAVARIPPA

SEQ ID NO: 1640 - protein, 15 aa, Phleum pratense
LNGPFIATVQQRGAA

SEQ ID NO: 1641 - protein, 15 aa, Phleum pratense
QQRGAAIIKARKLSS

SEQ ID NO: 1642 - protein, 15 aa, Phleum pratense
IIKARKLSSALSAAS

SEQ ID NO: 1643 - protein, 15 aa, Phleum pratense
LSSALSAASSACDHI

SEQ ID NO: 1644 - protein, 15 aa, Phleum pratense
GTPEGTFVSMGVYSD

SEQ ID NO: 1645 - protein, 15 aa, Phleum pratense
PPPGQHIAMAASSRR

SEQ ID NO: 1646 - protein, 15 aa, Phleum pratense
ASQLLGSAASRFLHS

SEQ ID NO: 1647 - protein, 15 aa, Phleum pratense
SRFLHSRGYAAAAAA

SEQ ID NO: 1648 - protein, 15 aa, Phleum pratense
RGYAAAAAAPSPAVF

SEQ ID NO: 1649 - protein, 15 aa, Phleum pratense
LGLPVFNSVAEAKAE

SEQ ID NO: 1650 - protein, 15 aa, Phleum pratense
TKANASVIYVPPPFA

SEQ ID NO: 1651 - protein, 15 aa, Phleum pratense
VIYVPPPFAAAAIME

SEQ ID NO: 1652 - protein, 15 aa, Phleum pratense
PFAAAAIMEALEAEL

SEQ ID NO: 1653 - protein, 15 aa, Phleum pratense
QHDMVKVKAALNRQS

SEQ ID NO: 1654 - protein, 15 aa, Phleum pratense
TLTYEAVFQTTAVGL

SEQ ID NO: 1655 - protein, 15 aa, Phleum pratense
DKPVVAFIAGLTAPP

SEQ ID NO: 1656 - protein, 15 aa, Phleum pratense
KIKALREAGVTVVES

SEQ ID NO: 1657 - protein, 15 aa, Phleum pratense
GSTMFEIFKQRGMVE

SEQ ID NO: 1658 - protein, 15 aa, Phleum pratense
GSGDFKTIKEALAKV

SEQ ID NO: 1659 - protein, 15 aa, Phleum pratense
MYVMYIKEGTYKEYV

SEQ ID NO: 1660 - protein, 15 aa, Phleum pratense
YKEYVTVPRTVTNLV

SEQ ID NO: 1661 - protein, 15 aa, Phleum pratense
VTNLVMIGDGAAKTI

SEQ ID NO: 1662 - protein, 15 aa, Phleum pratense
NFKMNLTSMVAVSLV

SEQ ID NO: 1663 - protein, 15 aa, Phleum pratense
YQDTLYTHAQRQFFR

SEQ ID NO: 1664 - protein, 15 aa, Phleum pratense
GTIDFIFGNSQVVIQ

SEQ ID NO: 1665 - protein, 15 aa, Phleum pratense
AKTIILKFLLPVMIV

SEQ ID NO: 1666 - protein, 15 aa, Phleum pratense
NTRVLLLRRTSPFSA

SEQ ID NO: 1667 - protein, 15 aa, Phleum pratense
DGYYIHGQCAIIMFD

SEQ ID NO: 1668 - protein, 15 aa, Phleum pratense
QCAIIMFDVTSRLTY

SEQ ID NO: 1669 - protein, 15 aa, Phleum pratense
RKKNLQYYEISAKSN

SEQ ID NO: 1670 - protein, 15 aa, Phleum pratense
SAKSNYNFEKPFLYL

SEQ ID NO: 1671 - protein, 15 aa, Phleum pratense
KPFLYLARKLAGDAN

SEQ ID NO: 1672 - protein, 15 aa, Phleum pratense
ANIHFVEAVALKPPE

SEQ ID NO: 1673 - protein, 15 aa, Phleum pratense
EAELAAAAAQPLPDD

SEQ ID NO: 1674 - protein, 15 aa, Phleum pratense
RTSSWGSGASLKIDR

SEQ ID NO: 1675 - protein, 15 aa, Phleum pratense
SLKIDRRELVTTRIY

SEQ ID NO: 1676 - protein, 15 aa, Phleum pratense
RFLHAAVAMATKRSV

SEQ ID NO: 1677 - protein, 15 aa, Phleum pratense
KGKKVFLRADLNVPL

SEQ ID NO: 1678 - protein, 15 aa, Phleum pratense
TRIRASIPTIKFLLE

SEQ ID NO: 1679 - protein, 15 aa, Phleum pratense
TIKFLLEKGAKVILA

SEQ ID NO: 1680 - protein, 15 aa, Phleum pratense
EKGAKVILASHLGRP

SEQ ID NO: 1681 - protein, 15 aa, Phleum pratense
VPRLSELLGVEVVMA

SEQ ID NO: 1682 - protein, 15 aa, Phleum pratense
GGVLLLENVRFYKEE

SEQ ID NO: 1683 - protein, 15 aa, Phleum pratense
PEFAKKLASVADLYV

SEQ ID NO: 1684 - protein, 15 aa, Phleum pratense
KFLRPSVAGFLMQKE

SEQ ID NO: 1685 - protein, 15 aa, Phleum pratense
VAGFLMQKELDYLVG

SEQ ID NO: 1686 - protein, 15 aa, Phleum pratense
KELDYLVGAVANPKK

SEQ ID NO: 1687 - protein, 15 aa, Phleum pratense
KIGVIESLLAKVDIL

SEQ ID NO: 1688 - protein, 15 aa, Phleum pratense
GMIFTFYKAQGKAVG

SEQ ID NO: 1689 - protein, 15 aa, Phleum pratense
EEDKLELATSLIETA

SEQ ID NO: 1690 - protein, 15 aa, Phleum pratense
GVSLLLPTDVVVADK

SEQ ID NO: 1691 - protein, 15 aa, Phleum pratense
SAPALRILRSFPSHS

SEQ ID NO: 1692 - protein, 15 aa, Phleum pratense
VELVAVNDPFITTDY

SEQ ID NO: 1693 - protein, 15 aa, Phleum pratense
DYMTYMFKYDTVHGQ

SEQ ID NO: 1694 - protein, 15 aa, Phleum pratense
GGAKKVIISAPSKDA

SEQ ID NO: 1695 - protein, 15 aa, Phleum pratense
YTSDITIVSNASCTT

SEQ ID NO: 1696 - protein, 15 aa, Phleum pratense
KVINDRFGIVEGLMT

SEQ ID NO: 1697 - protein, 15 aa, Phleum pratense
FGIVEGLMTTVHAMT

SEQ ID NO: 1698 - protein, 15 aa, Phleum pratense
GGRAASFNIIPSSTG

SEQ ID NO: 1699 - protein, 15 aa, Phleum pratense
LTVRLEKAATYEQIK

SEQ ID NO: 1700 - protein, 15 aa, Phleum pratense
ALNDNFVKLVSWYDN

SEQ ID NO: 1701 - protein, 15 aa, Phleum pratense
IGKRFASINVENVED

SEQ ID NO: 1702 - protein, 15 aa, Phleum pratense
ALRELLFTTPGALQH

SEQ ID NO: 1703 - protein, 15 aa, Phleum pratense
LQHISGVILFEETLY

SEQ ID NO: 1704 - protein, 15 aa, Phleum pratense
YEAGARFAKWRAVLK

SEQ ID NO: 1705 - protein, 15 aa, Phleum pratense
GLARYAIICQENGLV

SEQ ID NO: 1706 - protein, 15 aa, Phleum pratense
RCAYVTEVVLAACYK

SEQ ID NO: 1707 - protein, 15 aa, Phleum pratense
NDQHVLLEGSLLKPN

SEQ ID NO: 1708 - protein, 15 aa, Phleum pratense
WFLSFSFGRALQQST

SEQ ID NO: 1709 - protein, 15 aa, Phleum pratense
IPPAPHLKRWNRVVD

SEQ ID NO: 1710 - protein, 15 aa, Phleum pratense
LKRWNRVVDTNLESP

SEQ ID NO: 1711 - protein, 15 aa, Phleum pratense
VVDTNLESPNDIVPE

SEQ ID NO: 1712 - protein, 15 aa, Phleum pratense
GAPFTGSGYRIAPYS

SEQ ID NO: 1713 - protein, 15 aa, Phleum pratense
GYRIAPYSSILLKAT

SEQ ID NO: 1714 - protein, 15 aa, Phleum pratense
SFRFFLAHSSIHPST

SEQ ID NO: 1715 - protein, 15 aa, Phleum pratense
EKHFKYVILGGGVAA

SEQ ID NO: 1716 - protein, 15 aa, Phleum pratense
TEKGIELILSTEIVK

SEQ ID NO: 1717 - protein, 15 aa, Phleum pratense
ASKTLTSAAGATFTY

SEQ ID NO: 1718 - protein, 15 aa, Phleum pratense
FTYETLLIATGSSTI

SEQ ID NO: 1719 - protein, 15 aa, Phleum pratense
GGGYIGLELSAALKL

SEQ ID NO: 1720 - protein, 15 aa, Phleum pratense
LELSAALKLNNFDVT

SEQ ID NO: 1721 - protein, 15 aa, Phleum pratense
LKLNNFDVTMVYPEP

SEQ ID NO: 1722 - protein, 15 aa, Phleum pratense
MPRLFTAGIAHFYEG

SEQ ID NO: 1723 - protein, 15 aa, Phleum pratense
HFYEGYYASKGINIV

SEQ ID NO: 1724 - protein, 15 aa, Phleum pratense
SKGINIVKGTVASGF

SEQ ID NO: 1725 - protein, 15 aa, Phleum pratense
DANIVIVGVGGRPLT

SEQ ID NO: 1726 - protein, 15 aa, Phleum pratense
KTDTFFETSVAGVYA

SEQ ID NO: 1727 - protein, 15 aa, Phleum pratense
VYAIGDVASFPMKLY

SEQ ID NO: 1728 - protein, 15 aa, Phleum pratense
DYLPYFYSRSFDIAW

SEQ ID NO: 1729 - protein, 15 aa, Phleum pratense
EQFVTPWSFSVASGH

SEQ ID NO: 1730 - protein, 15 aa, Phleum pratense
RDAHYLRGLLPPAIV

SEQ ID NO: 1731 - protein, 15 aa, Phleum pratense
MHNLRQYTVPLQRYI

SEQ ID NO: 1732 - protein, 15 aa, Phleum pratense
VPLQRYIAMMDLQER

SEQ ID NO: 1733 - protein, 15 aa, Phleum pratense
ERLFYKLLIDNVEEL

SEQ ID NO: 1734 - protein, 15 aa, Phleum pratense
EELLPVVYTPVVGEA

SEQ ID NO: 1735 - protein, 15 aa, Phleum pratense
RSIQVIVVTDGERIL

SEQ ID NO: 1736 - protein, 15 aa, Phleum pratense
EEYHELLQEFMNAVK

SEQ ID NO: 1737 - protein, 15 aa, Phleum pratense
GEKVLVQFEDFANHN

SEQ ID NO: 1738 - protein, 15 aa, Phleum pratense
FDLLAKYSKSHLVFN

SEQ ID NO: 1739 - protein, 15 aa, Phleum pratense
VFNDDIQGTASVVLA

SEQ ID NO: 1740 - protein, 15 aa, Phleum pratense
SVVLAGLLAALKVIG

SEQ ID NO: 1741 - protein, 15 aa, Phleum pratense
GLADQTYLFLGAGEA

SEQ ID NO: 1742 - protein, 15 aa, Phleum pratense
TGIAELIALEMSKHT

SEQ ID NO: 1743 - protein, 15 aa, Phleum pratense
CRKKIWLVDSKGLLV

SEQ ID NO: 1744 - protein, 15 aa, Phleum pratense
HEPLTTLLEAVQSLK

SEQ ID NO: 1745 - protein, 15 aa, Phleum pratense
LLEAVQSLKPTVLIG

SEQ ID NO: 1746 - protein, 15 aa, Phleum pratense
NEKPVIFSLSNPTSH

SEQ ID NO: 1747 - protein, 15 aa, Phleum pratense
EEAYTWTKGTAVFAS

SEQ ID NO: 1748 - protein, 15 aa, Phleum pratense
GFGLGVVISGAIRVH

SEQ ID NO: 1749 - protein, 15 aa, Phleum pratense
VISGAIRVHDDMLLA

SEQ ID NO: 1750 - protein, 15 aa, Phleum pratense
HDDMLLAASEALAEQ

SEQ ID NO: 1751 - protein, 15 aa, Phleum pratense
FPPFTNIRKISANIA

SEQ ID NO: 1752 - protein, 15 aa, Phleum pratense
IRKISANIAAKVAAK

SEQ ID NO: 1753 - protein, 15 aa, Phleum pratense
QIIRKGFYLTKNVEH

SEQ ID NO: 1754 - protein, 15 aa, Phleum pratense
FYLTKNVEHKGQVDL

SEQ ID NO: 1755 - protein, 15 aa, Phleum pratense
VEHKGQVDLVTETDK

SEQ ID NO: 1756 - protein, 15 aa, Phleum pratense
TDKACEDLIFNHLRK

SEQ ID NO: 1757 - protein, 15 aa, Phleum pratense
DLIFNHLRKLYPDHK

SEQ ID NO: 1758 - protein, 15 aa, Phleum pratense
IEIDSLFEGIDFYST

SEQ ID NO: 1759 - protein, 15 aa, Phleum pratense
IDFYSTITRARFEEL

SEQ ID NO: 1760 - protein, 15 aa, Phleum pratense
IPKVQQLLQDFFNGK

SEQ ID NO: 1761 - protein, 15 aa, Phleum pratense
EAVAYGAAVQAAILS

SEQ ID NO: 1762 - protein, 15 aa, Phleum pratense
VQDLLLLDVTPLSLG

SEQ ID NO: 1763 - protein, 15 aa, Phleum pratense
QEMAYWSLKAAIEIG

SEQ ID NO: 1764 - protein, 15 aa, Phleum pratense
DAASSLYLFGENLPR

SEQ ID NO: 1765 - protein, 15 aa, Phleum pratense
GYNISLASMIPDYDT

SEQ ID NO: 1766 - protein, 15 aa, Phleum pratense
YDTVITNVRRSLAVA

SEQ ID NO: 1767 - protein, 15 aa, Phleum pratense
LEKIVAILSAFVDAA

SEQ ID NO: 1768 - protein, 15 aa, Phleum pratense
NVRRSLAVAKKNHLA

SEQ ID NO: 1769 - protein, 15 aa, Phleum pratense
VAKKNHLAWNCERCR

SEQ ID NO: 1770 - protein, 15 aa, Phleum pratense
LAWNCERCRKGESKK

SEQ ID NO: 1771 - protein, 15 aa, Phleum pratense
KKTVDAILSAFVDAA

SEQ ID NO: 1772 - protein, 15 aa, Phleum pratense
LMSFSWICACVRAAA

SEQ ID NO: 1773 - protein, 15 aa, Phleum pratense
ICACVRAAAVAWEAG

SEQ ID NO: 1774 - protein, 15 aa, Phleum pratense
VRVKILFTALCHTDV

SEQ ID NO: 1775 - protein, 15 aa, Phleum pratense
MCDLLRINTDRGVMI

SEQ ID NO: 1776 - protein, 15 aa, Phleum pratense
KPIFHFVGTSTFSEY

SEQ ID NO: 1777 - protein, 15 aa, Phleum pratense
VGTSTFSEYTVMHVG

SEQ ID NO: 1778 - protein, 15 aa, Phleum pratense
VAIFGLGAVGLAAAE

SEQ ID NO: 1779 - protein, 15 aa, Phleum pratense
GAVGLAAAEGARIAG

SEQ ID NO: 1780 - protein, 15 aa, Phleum pratense
GNINAMIQAFECVHD

SEQ ID NO: 1781 - protein, 15 aa, Phleum pratense
LKGTFFGNFKPRTDL

SEQ ID NO: 1782 - protein, 15 aa, Phleum pratense
KFITHSVTFSEINKA

SEQ ID NO: 1783 - protein, 15 aa, Phleum pratense
VTFSEINKAFDLMAK

SEQ ID NO: 1784 - protein, 15 aa, Phleum pratense
ALRWNLQMGHSVLPK

SEQ ID NO: 1785 - protein, 15 aa, Phleum pratense
NLDVYDWSIPDDLLA

SEQ ID NO: 1786 - protein, 15 aa, Phleum pratense
DDLLAKFSEIKQTRL

SEQ ID NO: 1787 - protein, 15 aa, Phleum pratense
FSEIKQTRLLMGNFI

SEQ ID NO: 1788 - protein, 15 aa, Phleum pratense
TRLLMGNFIVNKDSV

SEQ ID NO: 1789 - protein, 15 aa, Phleum pratense
QDFKKVNEIYAKYFP

SEQ ID NO: 1790 - protein, 15 aa, Phleum pratense
NEIYAKYFPSPAPAR

SEQ ID NO: 1791 - protein, 15 aa, Phleum pratense
YFPSPAPARSTYQVA

SEQ ID NO: 1792 - protein, 15 aa, Phleum pratense
ARSTYQVAALPLDAR

SEQ ID NO: 1793 - protein, 15 aa, Phleum pratense
LPLDARIEIECIAAL

SEQ ID NO: 1794 - protein, 15 aa, Phleum pratense
EEAASTLPGLSSSTL

SEQ ID NO: 1795 - protein, 15 aa, Phleum pratense
STKIFLESSTMESRA

SEQ ID NO: 1796 - protein, 15 aa, Phleum pratense
CAAVLAASAVVVLVV

SEQ ID NO: 1797 - protein, 15 aa, Phleum pratense
VVVLVVASGLAGSRV

SEQ ID NO: 1798 - protein, 15 aa, Phleum pratense
LAGSRVVRVAVDVAT

SEQ ID NO: 1799 - protein, 15 aa, Phleum pratense
GWYHLFYQYNPEGAV

SEQ ID NO: 1800 - protein, 15 aa, Phleum pratense
SRDLIHWRHLPLAMV

SEQ ID NO: 1801 - protein, 15 aa, Phleum pratense
LNMLYTGSTNASVQV

SEQ ID NO: 1802 - protein, 15 aa, Phleum pratense
IAMVYKTKDFVSYEL

SEQ ID NO: 1803 - protein, 15 aa, Phleum pratense
TKDFVSYELIPGLLH

SEQ ID NO: 1804 - protein, 15 aa, Phleum pratense
WGKFYASKTFYDPAK

SEQ ID NO: 1805 - protein, 15 aa, Phleum pratense
KGWASLMSIPRTVDL

SEQ ID NO: 1806 - protein, 15 aa, Phleum pratense
LRHATQLDIEAAFRL

SEQ ID NO: 1807 - protein, 15 aa, Phleum pratense
EAAFRLDHAAVAALN

SEQ ID NO: 1808 - protein, 15 aa, Phleum pratense
EQTAVYFYVSRGLDG

SEQ ID NO: 1809 - protein, 15 aa, Phleum pratense
VKRVVGYTVPVLDGE

SEQ ID NO: 1810 - protein, 15 aa, Phleum pratense
EAFSVRVLVDHSIVE

SEQ ID NO: 1811 - protein, 15 aa, Phleum pratense
EAIYAAAGVYLFNNA

SEQ ID NO: 1812 - protein, 15 aa, Phleum pratense
VYLFNNATSGTVTVE

SEQ ID NO: 1813 - protein, 15 aa, Phleum pratense
TDIVEVVVSPPYVFL

SEQ ID NO: 1814 - protein, 15 aa, Phleum pratense
SPPYVFLPTVKDKLR

SEQ ID NO: 1815 - protein, 15 aa, Phleum pratense
GAFTGEVSAEMLANL

SEQ ID NO: 1816 - protein, 15 aa, Phleum pratense
VSAEMLANLGIPWVI

SEQ ID NO: 1817 - protein, 15 aa, Phleum pratense
GESSEFVGDKVAYAL

SEQ ID NO: 1818 - protein, 15 aa, Phleum pratense
GDKVAYALAQGLKVI

SEQ ID NO: 1819 - protein, 15 aa, Phleum pratense
STMTVVAEQTKAIAD

SEQ ID NO: 1820 - protein, 15 aa, Phleum pratense
DWTNVVIAYEPVWAI

SEQ ID NO: 1821 - protein, 15 aa, Phleum pratense
IAYEPVWAIGTGKVA

SEQ ID NO: 1822 - protein, 15 aa, Phleum pratense
LKPEFIDIINAATVK

SEQ ID NO: 1823 - protein, 15 aa, Phleum pratense
VWQHDRVEIIANDQG

SEQ ID NO: 1824 - protein, 15 aa, Phleum pratense
VEIIANDQGNRTTPS

SEQ ID NO: 1825 - protein, 15 aa, Phleum pratense
TTPSYVAFTDSERLI

SEQ ID NO: 1826 - protein, 15 aa, Phleum pratense
KNQVAMNPINTVFGE

SEQ ID NO: 1827 - protein, 15 aa, Phleum pratense
NPINTVFGEHLSTCT

SEQ ID NO: 1828 - protein, 15 aa, Phleum pratense
SSTRGWCSRRRAGRG

SEQ ID NO: 1829 - protein, 15 aa, Phleum pratense
EEKQFAAEEISSMVL

SEQ ID NO: 1830 - protein, 15 aa, Phleum pratense
SSMVLIKMREIAEAF

SEQ ID NO: 1831 - protein, 15 aa, Phleum pratense
SIKNAVVTVPAYFND

SEQ ID NO: 1832 - protein, 15 aa, Phleum pratense
GVIAGLNVLRIINEP

SEQ ID NO: 1833 - protein, 15 aa, Phleum pratense
VLRIINEPTAAAIAY

SEQ ID NO: 1834 - protein, 15 aa, Phleum pratense
GILLDFVWYEPLTYN

SEQ ID NO: 1835 - protein, 15 aa, Phleum pratense
ETMQRLVADRLPNFT

SEQ ID NO: 1836 - protein, 15 aa, Phleum pratense
GYSKWLYVVPWGFYK

SEQ ID NO: 1837 - protein, 15 aa, Phleum pratense
YVVPWGFYKAVMHVK

SEQ ID NO: 1838 - protein, 15 aa, Phleum pratense
KFRIDYFDQYLHELK

SEQ ID NO: 1839 - protein, 15 aa, Phleum pratense
ARVTGYFAWSLLDNF

SEQ ID NO: 1840 - protein, 15 aa, Phleum pratense
FAWSLLDNFEWRMGF

SEQ ID NO: 1841 - protein, 15 aa, Phleum pratense
FKDDPYIYAFDSLKY

SEQ ID NO: 1842 - protein, 15 aa, Phleum pratense
AFDSLKYIGIELWQV

SEQ ID NO: 1843 - protein, 15 aa, Phleum pratense
IELWQVKSGTLFDNI

SEQ ID NO: 1844 - protein, 15 aa, Phleum pratense
GTLFDNILITDDAAL

SEQ ID NO: 1845 - protein, 15 aa, Phleum pratense
ILITDDAALAKTFAE

SEQ ID NO: 1846 - protein, 15 aa, Phleum pratense
KRPPRCCQDLVVLPL

SEQ ID NO: 1847 - protein, 15 aa, Phleum pratense
RGLLRRARGGPHHRR

SEQ ID NO: 1848 - protein, 15 aa, Phleum pratense
RGAHRRVPLRPLRHR

SEQ ID NO: 1849 - protein, 15 aa, Phleum pratense
EGRRAKLRSAGEVEI

SEQ ID NO: 1850 - protein, 15 aa, Phleum pratense
GEVEIQFRRVKCKYP

SEQ ID NO: 1851 - protein, 15 aa, Phleum pratense
TKVTFHVVGVGPLLH

SEQ ID NO: 1852 - protein, 15 aa, Phleum pratense
EDVAVSLAKYTAELS

SEQ ID NO: 1853 - protein, 15 aa, Phleum pratense
GKFAAERGAFTVVLS

SEQ ID NO: 1854 - protein, 15 aa, Phleum pratense
AFTVVLSGGTLIDTL

SEQ ID NO: 1855 - protein, 15 aa, Phleum pratense
DSNYKLAVDGLLSKV

SEQ ID NO: 1856 - protein, 15 aa, Phleum pratense
TVLKQLVKSGVLAMS

SEQ ID NO: 1857 - protein, 15 aa, Phleum pratense
KSGVLAMSTATGFPR

SEQ ID NO: 1858 - protein, 15 aa, Phleum pratense
PPPQRITFTFPVIKS

SEQ ID NO: 1859 - protein, 15 aa, Phleum pratense
TFTFPVIKSSAYVAM

SEQ ID NO: 1860 - protein, 15 aa, Phleum pratense
KTLPLLPTEMAILQD

SEQ ID NO: 1861 - protein, 15 aa, Phleum pratense
NKLIGARSFFESAKW

SEQ ID NO: 1862 - protein, 15 aa, Phleum pratense
RAHIAFYQVCFEQKG

SEQ ID NO: 1863 - protein, 15 aa, Phleum pratense
AALNGVFVSTAAGNI

SEQ ID NO: 1864 - protein, 15 aa, Phleum pratense
APWLLTVGASTSDRR

SEQ ID NO: 1865 - protein, 15 aa, Phleum pratense
STSDRRFAATVKLGS

SEQ ID NO: 1866 - protein, 15 aa, Phleum pratense
VLRAGAFGMIVVAPA

SEQ ID NO: 1867 - protein, 15 aa, Phleum pratense
FGMIVVAPAVFGPVI

SEQ ID NO: 1868 - protein, 15 aa, Phleum pratense
YAVGQKIKAYLEAES

SEQ ID NO: 1869 - protein, 15 aa, Phleum pratense
VPGVVDIVLQPKEVM

SEQ ID NO: 1870 - protein, 15 aa, Phleum pratense
CPHLAGIAALLKNAH

SEQ ID NO: 1871 - protein, 15 aa, Phleum pratense
GLVYNLTAAEYIPYL

SEQ ID NO: 1872 - protein, 15 aa, Phleum pratense
KADSVVNASRAVTNV

SEQ ID NO: 1873 - protein, 15 aa, Phleum pratense
KLTFKALEEVLNYTV

SEQ ID NO: 1874 - protein, 15 aa, Phleum pratense
EEVLNYTVTVKTAAV

SEQ ID NO: 1875 - protein, 15 aa, Phleum pratense
IEGQLKWVSSKHIVR

SEQ ID NO: 1876 - protein, 15 aa, Phleum pratense
WVSSKHIVRSPILIL

SEQ ID NO: 1877 - protein, 15 aa, Phleum pratense
ELRKTYNLLDAVSRH

SEQ ID NO: 1878 - protein, 15 aa, Phleum pratense
QVYPRSWSAVMLTFD

SEQ ID NO: 1879 - protein, 15 aa, Phleum pratense
AVMLTFDNAGMWNVR

SEQ ID NO: 1880 - protein, 15 aa, Phleum pratense
NVWERHYLAGEMTLM

SEQ ID NO: 1881 - protein, 15 aa, Phleum pratense
GEQLYISVISPARSL

SEQ ID NO: 1882 - protein, 15 aa, Phleum pratense
DSSEYAFRTAVSSSM

SEQ ID NO: 1883 - protein, 15 aa, Phleum pratense
IGNLRLDNTTLIDKD

SEQ ID NO: 1884 - protein, 15 aa, Phleum pratense
EIPMIQNILSRSQIF

SEQ ID NO: 1885 - protein, 15 aa, Phleum pratense
SRSQIFDGIPNLMSL

SEQ ID NO: 1886 - protein, 15 aa, Phleum pratense
DGIPNLMSLDNVVKI

SEQ ID NO: 1887 - protein, 15 aa, Phleum pratense
IWVNVEYDSFYREHG

SEQ ID NO: 1888 - protein, 15 aa, Phleum pratense
EFPVTWVSSPEVALL

SEQ ID NO: 1889 - protein, 15 aa, Phleum pratense
SPEVALLKSLAGKLR

SEQ ID NO: 1890 - protein, 15 aa, Phleum pratense
AGKLRNSTKLIFRFL

SEQ ID NO: 1891 - protein, 15 aa, Phleum pratense
STKLIFRFLREDLVE

SEQ ID NO: 1892 - protein, 15 aa, Phleum pratense
GELLKDLKSIKAFAS

SEQ ID NO: 1893 - protein, 15 aa, Phleum pratense
LKSIKAFASGILVPK

SEQ ID NO: 1894 - protein, 15 aa, Phleum pratense
CEGILKLLETHLVPS

SEQ ID NO: 1895 - protein, 15 aa, Phleum pratense
LLETHLVPSSTAPES

SEQ ID NO: 1896 - protein, 15 aa, Phleum pratense
PESKVFYLKMKGDYH

SEQ ID NO: 1897 - protein, 15 aa, Phleum pratense
MNSYKAAQDIALADL

SEQ ID NO: 1898 - protein, 15 aa, Phleum pratense
APTHPIRLGLALKIS

SEQ ID NO: 1899 - protein, 15 aa, Phleum pratense
LLGLLAPLASAQLSR

SEQ ID NO: 1900 - protein, 15 aa, Phleum pratense
PDAEKIVAAVIEKKL

SEQ ID NO: 1901 - protein, 15 aa, Phleum pratense
AGLLRLLFHDCFANG

SEQ ID NO: 1902 - protein, 15 aa, Phleum pratense
CDASILIDPLSNQSA

SEQ ID NO: 1903 - protein, 15 aa, Phleum pratense
IDSSYFANVLAKKMP

SEQ ID NO: 1904 - protein, 15 aa, Phleum pratense
KPNDFMPTFAKAMEK

SEQ ID NO: 1905 - protein, 15 aa, Phleum pratense
PTFAKAMEKLSVLKV

SEQ ID NO: 1906 - protein, 15 aa, Phleum pratense
GGSVIRISSANPEDL

SEQ ID NO: 1907 - protein, 15 aa, Phleum pratense
DPWHVKTLKAAGAAH

SEQ ID NO: 1908 - protein, 15 aa, Phleum pratense
WSEIQTLKPNLIGPF

SEQ ID NO: 1909 - protein, 15 aa, Phleum pratense
KFMTLAGFLDYAKAS

SEQ ID NO: 1910 - protein, 15 aa, Phleum pratense
NISGILIGIEHAAYL

SEQ ID NO: 1911 - protein, 15 aa, Phleum pratense
AAYLATRGLDVVDAV

SEQ ID NO: 1912 - protein, 15 aa, Phleum pratense
GLDVVDAVSNALIKS

SEQ ID NO: 1913 - protein, 15 aa, Phleum pratense
TKQQVFIQSEDPPVL

SEQ ID NO: 1914 - protein, 15 aa, Phleum pratense
PVLSAFKKFPKFNRV

SEQ ID NO: 1915 - protein, 15 aa, Phleum pratense
KFPKFNRVFEIEFDI

SEQ ID NO: 1916 - protein, 15 aa, Phleum pratense
VEIKEFANAVKLRRS

SEQ ID NO: 1917 - protein, 15 aa, Phleum pratense
VKLRRSSAAQVDGFY

SEQ ID NO: 1918 - protein, 15 aa, Phleum pratense
GFYLTGFNAVVERLR

SEQ ID NO: 1919 - protein, 15 aa, Phleum pratense
GVLKNEFMSLAFDYW

SEQ ID NO: 1920 - protein, 15 aa, Phleum pratense
GLVTEFPSTAAAYFR

SEQ ID NO: 1921 - protein, 15 aa, Phleum pratense
NIVVNVFNQLDQPLL

SEQ ID NO: 1922 - protein, 15 aa, Phleum pratense
QPLLFTWNGIQHRKN

SEQ ID NO: 1923 - protein, 15 aa, Phleum pratense
IGSFFYFPSIGMQRT

SEQ ID NO: 1924 - protein, 15 aa, Phleum pratense
GYGLISVVSRLLIPV

SEQ ID NO: 1925 - protein, 15 aa, Phleum pratense
VVSRLLIPVPFDPPA

SEQ ID NO: 1926 - protein, 15 aa, Phleum pratense
SVFKKFPKFRRVLVI

SEQ ID NO: 1927 - protein, 15 aa, Phleum pratense
PKFRRVLVIDPVISG

SEQ ID NO: 1928 - protein, 15 aa, Phleum pratense
IGEIKGFADAVMVSR

SEQ ID NO: 1929 - protein, 15 aa, Phleum pratense
FADAVMVSRGSLVRV

SEQ ID NO: 1930 - protein, 15 aa, Phleum pratense
VSRGSLVRVNGFFLT

SEQ ID NO: 1931 - protein, 15 aa, Phleum pratense
VNGFFLTGFNDLVTE

SEQ ID NO: 1932 - protein, 15 aa, Phleum pratense
KELGGKILRQPGPLP

SEQ ID NO: 1933 - protein, 15 aa, Phleum pratense
ILRQPGPLPGLNTKI

SEQ ID NO: 1934 - protein, 15 aa, Phleum pratense
LRGLNTKIASFLDPD

SEQ ID NO: 1935 - protein, 15 aa, Phleum pratense
KIASFLDPDGWKVVL

SEQ ID NO: 1936 - protein, 15 aa, Phleum pratense
GWKVVLVDHADFLKE

SEQ ID NO: 1937 - protein, 15 aa, Phleum pratense
QDNAKIVQIDSSIQA

SEQ ID NO: 1938 - protein, 15 aa, Phleum pratense
RLVCLRVHPTFTLLH

SEQ ID NO: 1939 - protein, 15 aa, Phleum pratense
HPTFTLLHPTEVVVA

SEQ ID NO: 1940 - protein, 15 aa, Phleum pratense
TEVVVAFTAINGSRQ

SEQ ID NO: 1941 - protein, 15 aa, Phleum pratense
LVNRFEISQVSKCLV

SEQ ID NO: 1942 - protein, 15 aa, Phleum pratense
ADPCSEYFVEAYLNN

SEQ ID NO: 1943 - protein, 15 aa, Phleum pratense
YFVEAYLNNPLVQKA

SEQ ID NO: 1944 - protein, 15 aa, Phleum pratense
VQKAIHANTALNYPW

SEQ ID NO: 1945 - protein, 15 aa, Phleum pratense
PSMLAHIKALVTTGI

SEQ ID NO: 1946 - protein, 15 aa, Phleum pratense
LYSGDLDAMVPVTAS

SEQ ID NO: 1947 - protein, 15 aa, Phleum pratense
LNYPWTGCRTRTYNL

SEQ ID NO: 1948 - protein, 15 aa, Phleum pratense
YNLRRFGASPPSMLA

SEQ ID NO: 1949 - protein, 15 aa, Phleum pratense
HIKALVTTASASGCT

SEQ ID NO: 1950 - protein, 15 aa, Phleum pratense
VKKIVTVLNEAEVPS

SEQ ID NO: 1951 - protein, 15 aa, Phleum pratense
EDAVEVVVSPPFVFL

SEQ ID NO: 1952 - protein, 15 aa, Phleum pratense
VSPPFVFLQQAKALL

SEQ ID NO: 1953 - protein, 15 aa, Phleum pratense
FLQQAKALLRPDFAV

SEQ ID NO: 1954 - protein, 15 aa, Phleum pratense
ALLRPDFAVAAQNCW

SEQ ID NO: 1955 - protein, 15 aa, Phleum pratense
GAFTGEISAEMLVNL

SEQ ID NO: 1956 - protein, 15 aa, Phleum pratense
ISAEMLVNLQVPWVI

SEQ ID NO: 1957 - protein, 15 aa, Phleum pratense
ESNDFVADKVAYALA

SEQ ID NO: 1958 - protein, 15 aa, Phleum pratense
ADKVAYALAQGLKVI

SEQ ID NO: 1959 - protein, 15 aa, Phleum pratense
TTMEVVAAQTKAIAE

SEQ ID NO: 1960 - protein, 15 aa, Phleum pratense
WTNVVLAYEPVWAIG

SEQ ID NO: 1961 - protein, 15 aa, Phleum pratense
LRKWLHANVGPAVAE

SEQ ID NO: 1962 - protein, 15 aa, Phleum pratense
PEFVDIIKSATVKSS

SEQ ID NO: 1963 - protein, 15 aa, Phleum pratense
EDSHFVVELTYNYGV

SEQ ID NO: 1964 - protein, 15 aa, Phleum pratense
RAIKFYEKAFGMELL

SEQ ID NO: 1965 - protein, 15 aa, Phleum pratense
NPQYKYTIAMMGYGP

SEQ ID NO: 1966 - protein, 15 aa, Phleum pratense
KNAVLELTYNYGVKE

SEQ ID NO: 1967 - protein, 15 aa, Phleum pratense
DGWKSVFVDNLDFLK

SEQ ID NO: 1968 - protein, 15 aa, Phleum pratense
LQSKNCILYLCSIMI

SEQ ID NO: 1969 - protein, 15 aa, Phleum pratense
ILYLCSIMICNCKVS

SEQ ID NO: 1970 - protein, 15 aa, Phleum pratense
IMICNCKVSKVLNTY

SEQ ID NO: 1971 - protein, 15 aa, Phleum pratense
KVSKVLNTYIFLLYL

SEQ ID NO: 1972 - protein, 15 aa, Phleum pratense
YQPAAMRRLSLILLA

SEQ ID NO: 1973 - protein, 15 aa, Phleum pratense
RRLSLILLAAAALLA

SEQ ID NO: 1974 - protein, 15 aa, Phleum pratense
LLAAAALLAAAVSAE

SEQ ID NO: 1975 - protein, 15 aa, Phleum pratense
CPRAERIIAEVVQSK

SEQ ID NO: 1976 - protein, 15 aa, Phleum pratense
AFDAVVRSKLALELE

SEQ ID NO: 1977 - protein, 15 aa, Phleum pratense
CADILAIASRVLVTM

SEQ ID NO: 1978 - protein, 15 aa, Phleum pratense
NFTVGRIIELFTAKG

SEQ ID NO: 1979 - protein, 15 aa, Phleum pratense
IIELFTAKGFTVQEM

SEQ ID NO: 1980 - protein, 15 aa, Phleum pratense
FTVQEMVALSGAHTL

SEQ ID NO: 1981 - protein, 15 aa, Phleum pratense
IAAFNDIMSSSVLSS

SEQ ID NO: 1982 - protein, 15 aa, Phleum pratense
FDNIYSVNIERGLGL

SEQ ID NO: 1983 - protein, 15 aa, Phleum pratense
NTDFFEDFAKAIEKL

SEQ ID NO: 1984 - protein, 15 aa, Phleum pratense
YPHMLLILLLLHGAN

SEQ ID NO: 1985 - protein, 15 aa, Phleum pratense
ILLLLHGANAALDEP

SEQ ID NO: 1986 - protein, 15 aa, Phleum pratense
ESSLYAYQFAMSNGL

SEQ ID NO: 1987 - protein, 15 aa, Phleum pratense
SGLRLDKSTLIAEVF

SEQ ID NO: 1988 - protein, 15 aa, Phleum pratense
IHGWFAVDFTAAELV

SEQ ID NO: 1989 - protein, 15 aa, Phleum pratense
EIPTISYSDLYQLAG

SEQ ID NO: 1990 - protein, 15 aa, Phleum pratense
YSDLYQLAGVVAVEV

SEQ ID NO: 1991 - protein, 15 aa, Phleum pratense
DHLRQVFGKQMGLSD

SEQ ID NO: 1992 - protein, 15 aa, Phleum pratense
KNPLKFDNTYFTELL

SEQ ID NO: 1993 - protein, 15 aa, Phleum pratense
KAFFEDYKEAHLRLS

SEQ ID NO: 1994 - protein, 15 aa, Phleum pratense
FSCDSAYQVTYIVRG

SEQ ID NO: 1995 - protein, 15 aa, Phleum pratense
YQVTYIVRGSGRVQV

SEQ ID NO: 1996 - protein, 15 aa, Phleum pratense
IEGGSLFIVPRFHVV

SEQ ID NO: 1997 - protein, 15 aa, Phleum pratense
GMEWFSIITTPNPIF

SEQ ID NO: 1998 - protein, 15 aa, Phleum pratense
GKTSVWKAISPEVLE

SEQ ID NO: 1999 - protein, 15 aa, Phleum pratense
SCRGRCPCSLRTPAW

SEQ ID NO: 2000 - protein, 15 aa, Phleum pratense
SLRTPAWGSCSRMAP

SEQ ID NO: 2001 - protein, 15 aa, Phleum pratense
WGSCSRMAPCNCRCP

SEQ ID NO: 2002 - protein, 15 aa, Phleum pratense
NCRCPCSTRGARRRL

SEQ ID NO: 2003 - protein, 15 aa, Phleum pratense
STRGARRRLPGRTSS

SEQ ID NO: 2004 - protein, 15 aa, Phleum pratense
TAPTSRRSPSAPSPH

SEQ ID NO: 2005 - protein, 15 aa, Phleum pratense
TRTCISTRRIPSRPT

SEQ ID NO: 2006 - protein, 15 aa, Phleum pratense
PWSTCRAARSPTPSA

SEQ ID NO: 2007 - protein, 15 aa, Phleum pratense
DRREIWLSEMVAWVG

SEQ ID NO: 2008 - protein, 15 aa, Phleum pratense
SEMVAWVGLQLAFWI

SEQ ID NO: 2009 - protein, 15 aa, Phleum pratense
PWRPPRRWSCCPLPW

SEQ ID NO: 2010 - protein, 15 aa, Phleum pratense
SCCPLPWPGTRRWWF

SEQ ID NO: 2011 - protein, 15 aa, Phleum pratense
GTRRWWFRCHQPPSS

SEQ ID NO: 2012 - protein, 15 aa, Phleum pratense
FRCHQPPSSRTAPGS

SEQ ID NO: 2013 - protein, 15 aa, Phleum pratense
PGSSRSLYGSPSTSC

SEQ ID NO: 2014 - protein, 15 aa, Phleum pratense
VKVAPAALVNVLEAR

SEQ ID NO: 2015 - protein, 15 aa, Phleum pratense
LVNVLEARSALTISV

SEQ ID NO: 2016 - protein, 15 aa, Phleum pratense
ARSALTISVLRISSM

SEQ ID NO: 2017 - protein, 15 aa, Phleum pratense
ISVLRISSMPFSVYH

SEQ ID NO: 2018 - protein, 15 aa, Phleum pratense
LAAFWGKRYPLLSAG

SEQ ID NO: 2019 - protein, 15 aa, Phleum pratense
SSPSCAPESTHAVRA

SEQ ID NO: 2020 - protein, 15 aa, Phleum pratense
PESTHAVRALPSTHT

SEQ ID NO: 2021 - protein, 15 aa, Phleum pratense
VRALPSTHTARILLR

SEQ ID NO: 2022 - protein, 15 aa, Phleum pratense
THTARILLRSTTANV

SEQ ID NO: 2023 - protein, 15 aa, Phleum pratense
LLRSTTANVSGCKDR

SEQ ID NO: 2024 - protein, 15 aa, Phleum pratense
VQVPGGHQGDLPRGE

SEQ ID NO: 2025 - protein, 15 aa, Phleum pratense
LPGAAGEVCRRRRRR

SEQ ID NO: 2026 - protein, 15 aa, Phleum pratense
GQGQVDRAQGVVGSH

SEQ ID NO: 2027 - protein, 15 aa, Phleum pratense
GVVGSHLEDRHSRQA

SEQ ID NO: 2028 - protein, 15 aa, Phleum pratense
LEDRHSRQAHRPLHR

SEQ ID NO: 2029 - protein, 15 aa, Phleum pratense
KHLIYVTGWSVYTEI

SEQ ID NO: 2030 - protein, 15 aa, Phleum pratense
TGWSVYTEITLLRDA

SEQ ID NO: 2031 - protein, 15 aa, Phleum pratense
SEGVRVLMLVWDDRT

SEQ ID NO: 2032 - protein, 15 aa, Phleum pratense
DDSGSIVQDLQISTM

SEQ ID NO: 2033 - protein, 15 aa, Phleum pratense
LQISTMFTHHQKIVV

SEQ ID NO: 2034 - protein, 15 aa, Phleum pratense
RRRRIMSFVGGLDLC

SEQ ID NO: 2035 - protein, 15 aa, Phleum pratense
PVAWDVLYNFEQRWR

SEQ ID NO: 2036 - protein, 15 aa, Phleum pratense
GKDLLIQLRDLADEI

SEQ ID NO: 2037 - protein, 15 aa, Phleum pratense
AWNVQLFRSIDGGAA

SEQ ID NO: 2038 - protein, 15 aa, Phleum pratense
DAYICAIRRAKSFIY

SEQ ID NO: 2039 - protein, 15 aa, Phleum pratense
IRRAKSFIYIENQYF

SEQ ID NO: 2040 - protein, 15 aa, Phleum pratense
FIYIENQYFLGSSYC

SEQ ID NO: 2041 - protein, 15 aa, Phleum pratense
RFTVYVVVPMWPEGI

SEQ ID NO: 2042 - protein, 15 aa, Phleum pratense
RRTMEMMYTDIAQAI

SEQ ID NO: 2043 - protein, 15 aa, Phleum pratense
MYTDIAQAIQAKGID

SEQ ID NO: 2044 - protein, 15 aa, Phleum pratense
DYLKAQQNRRFMIYV

SEQ ID NO: 2045 - protein, 15 aa, Phleum pratense
FMIYVHTKMMIVDDE

SEQ ID NO: 2046 - protein, 15 aa, Phleum pratense
IVDDEYIIVGSANIN

SEQ ID NO: 2047 - protein, 15 aa, Phleum pratense
YQPYHLAASRPARGQ

SEQ ID NO: 2048 - protein, 15 aa, Phleum pratense
GQVHGFRMALWYEHL

SEQ ID NO: 2049 - protein, 15 aa, Phleum pratense
RMALWYEHLGMVDEA

SEQ ID NO: 2050 - protein, 15 aa, Phleum pratense
CVRKVNAMADRYWNL

SEQ ID NO: 2051 - protein, 15 aa, Phleum pratense
LPGVEFFPDTQARIL

SEQ ID NO: 2052 - protein, 15 aa, Phleum pratense
HTFKSLFESWPVSST

SEQ ID NO: 2053 - protein, 15 aa, Phleum pratense
DCYIVLYTYHSGEKR

SEQ ID NO: 2054 - protein, 15 aa, Phleum pratense
FYLTYWIGKDSVLED

SEQ ID NO: 2055 - protein, 15 aa, Phleum pratense
QHMALQIATTIWNSM

SEQ ID NO: 2056 - protein, 15 aa, Phleum pratense
EPPQFIALFQPMVIL

SEQ ID NO: 2057 - protein, 15 aa, Phleum pratense
KDETYSGTGIALVHI

SEQ ID NO: 2058 - protein, 15 aa, Phleum pratense
GTGIALVHIHGTSIH

SEQ ID NO: 2059 - protein, 15 aa, Phleum pratense
NNKTLQVDAVSISLS

SEQ ID NO: 2060 - protein, 15 aa, Phleum pratense
TDCFVLQSGNSMFTW

SEQ ID NO: 2061 - protein, 15 aa, Phleum pratense
QQQWAAKVAEFLKPG

SEQ ID NO: 2062 - protein, 15 aa, Phleum pratense
DVLREPHLYTFSFRN

SEQ ID NO: 2063 - protein, 15 aa, Phleum pratense
LEVTEVFNFSQDDLL

SEQ ID NO: 2064 - protein, 15 aa, Phleum pratense
FNFSQDDLLTEDVMI

SEQ ID NO: 2065 - protein, 15 aa, Phleum pratense
DVMILDTHAEVFVWM

SEQ ID NO: 2066 - protein, 15 aa, Phleum pratense
CFFRTYFSWDNTRSV

SEQ ID NO: 2067 - protein, 15 aa, Phleum pratense
NSFQKKLSLLFGMRS

SEQ ID NO: 2068 - protein, 15 aa, Phleum pratense
RASALAALSSAFNPS

SEQ ID NO: 2069 - protein, 15 aa, Phleum pratense
QRASALAALSSSLNP

SEQ ID NO: 2070 - protein, 15 aa, Phleum pratense
SQRAAAVAALSNVLT

SEQ ID NO: 2071 - protein, 15 aa, Phleum pratense
VAALSNVLTAEGSTL

SEQ ID NO: 2072 - protein, 15 aa, Phleum pratense
ETTFSYDRLISKSTD

SEQ ID NO: 2073 - protein, 15 aa, Phleum pratense
YKRRETYLSDSEFET

SEQ ID NO: 2074 - protein, 15 aa, Phleum pratense
SEFETVFGVTKEEFY

SEQ ID NO: 2075 - protein, 15 aa, Phleum pratense
SRSFLKHSLLRTQRL

SEQ ID NO: 2076 - protein, 15 aa, Phleum pratense
HSLLRTQRLHKFLVC

SEQ ID NO: 2077 - protein, 15 aa, Phleum pratense
LHKFLVCSSMIGVMA

SEQ ID NO: 2078 - protein, 15 aa, Phleum pratense
SGNLVMFQMQDHQLI

SEQ ID NO: 2079 - protein, 15 aa, Phleum pratense
QLIYPLISPSFLVYS

SEQ ID NO: 2080 - protein, 15 aa, Phleum pratense
ISPSFLVYSFFVHDL

SEQ ID NO: 2081 - protein, 15 aa, Phleum pratense
ERLIYQTANSRLCSV

SEQ ID NO: 2082 - protein, 15 aa, Phleum pratense
ANSRLCSVLPKEEFY

SEQ ID NO: 2083 - protein, 15 aa, Phleum pratense
VLPKEEFYQQPRWKQ

SEQ ID NO: 2084 - protein, 15 aa, Phleum pratense
FYQQPRWKQELQKRK

SEQ ID NO: 2085 - protein, 15 aa, Phleum pratense
TGAAAAMTTTIRSTA

SEQ ID NO: 2086 - protein, 15 aa, Phleum pratense
TTIRSTATARPRAIV

SEQ ID NO: 2087 - protein, 15 aa, Phleum pratense
NIWADDLAASLSTLE

SEQ ID NO: 2088 - protein, 15 aa, Phleum pratense
IAIAFLSVSNNYEYI

SEQ ID NO: 2089 - protein, 15 aa, Phleum pratense
VSNNYEYILSDKLVV

SEQ ID NO: 2090 - protein, 15 aa, Phleum pratense
KDKLVVSTSCSLMHT

SEQ ID NO: 2091 - protein, 15 aa, Phleum pratense
TSCSLMHTAVDLVNE

SEQ ID NO: 2092 - protein, 15 aa, Phleum pratense
TKLDSEIKSWLAFAA

SEQ ID NO: 2093 - protein, 15 aa, Phleum pratense
IKSWLAFAAQKVVEV

SEQ ID NO: 2094 - protein, 15 aa, Phleum pratense
KVVEVNALGKALVGL

SEQ ID NO: 2095 - protein, 15 aa, Phleum pratense
LKDEAYFAANAAAQA

SEQ ID NO: 2096 - protein, 15 aa, Phleum pratense
EAYVSAIKEEISKVV

SEQ ID NO: 2097 - protein, 15 aa, Phleum pratense
ISKVVKIQEELDIDV

SEQ ID NO: 2098 - protein, 15 aa, Phleum pratense
MVEYFGEQLSGFAFT

SEQ ID NO: 2099 - protein, 15 aa, Phleum pratense
LSGFAFTANGWVQSY

SEQ ID NO: 2100 - protein, 15 aa, Phleum pratense
NPMTVFWSKMAQSMT

SEQ ID NO: 2101 - protein, 15 aa, Phleum pratense
EGPLMLYVSKMIPAS

SEQ ID NO: 2102 - protein, 15 aa, Phleum pratense
KGRFFAFGRVFAGRV

SEQ ID NO: 2103 - protein, 15 aa, Phleum pratense
GNTVALVGLDQFITK

SEQ ID NO: 2104 - protein, 15 aa, Phleum pratense
VGLDQFITKNATLTG

SEQ ID NO: 2105 - protein, 15 aa, Phleum pratense
PIRAMKFSVSPVVRV

SEQ ID NO: 2106 - protein, 15 aa, Phleum pratense
FMGGAEIIVSPPVVS

SEQ ID NO: 2107 - protein, 15 aa, Phleum pratense
SPPVVSFRETVLDKS

SEQ ID NO: 2108 - protein, 15 aa, Phleum pratense
NKHNRLYMEARPLEE

SEQ ID NO: 2109 - protein, 15 aa, Phleum pratense
PTARRVIFASQLTAK

SEQ ID NO: 2110 - protein, 15 aa, Phleum pratense
AKPRLLEPVYLVEIQ

SEQ ID NO: 2111 - protein, 15 aa, Phleum pratense
EPVYLVEIQAPEGAL

SEQ ID NO: 2112 - protein, 15 aa, Phleum pratense
PLYNIKAYLPVIESF

SEQ ID NO: 2113 - protein, 15 aa, Phleum pratense
LPVIESFGFSATLRA

SEQ ID NO: 2114 - protein, 15 aa, Phleum pratense
FGFSATLRAATSGQA

SEQ ID NO: 2115 - protein, 15 aa, Phleum pratense
SLKLHKACEAFNPYD

SEQ ID NO: 2116 - protein, 15 aa, Phleum pratense
EAFDPYYGKISLSKV

SEQ ID NO: 2117 - protein, 15 aa, Phleum pratense
SKVRSFLTEAKAKHI

SEQ ID NO: 2118 - protein, 15 aa, Phleum pratense
LTEAKAKHIEWNCDV

SEQ ID NO: 2119 - protein, 15 aa, Phleum pratense
KEKRWNAALTSISAS

SEQ ID NO: 2120 - protein, 15 aa, Phleum pratense
GSAYVDLGSLLAERT

SEQ ID NO: 2121 - protein, 15 aa, Phleum pratense
RHLARQFIPHLHQRF

SEQ ID NO: 2122 - protein, 15 aa, Phleum pratense
FIPHLHQRFIHPPIH

SEQ ID NO: 2123 - protein, 15 aa, Phleum pratense
NTMENLSSTIFSFVI

SEQ ID NO: 2124 - protein, 15 aa, Phleum pratense
TIFSFVILLSASASL

SEQ ID NO: 2125 - protein, 15 aa, Phleum pratense
ILLSASASLVVAGDP

SEQ ID NO: 2126 - protein, 15 aa, Phleum pratense
ELAEMEVSAAFHLFS

SEQ ID NO: 2127 - protein, 15 aa, Phleum pratense
SAAFHLFSMAVTAAR

SEQ ID NO: 2128 - protein, 15 aa, Phleum pratense
FSMAVTAARSQQWND

SEQ ID NO: 2129 - protein, 15 aa, Phleum pratense
KISLSKVRSFLTEAK

SEQ ID NO: 2130 - protein, 15 aa, Phleum pratense
QQYTAALSPILFECL

SEQ ID NO: 2131 - protein, 15 aa, Phleum pratense
LSPILFECLIHPMLG

SEQ ID NO: 2132 - protein, 15 aa, Phleum pratense
VEDNLVKLKNVLNVY

SEQ ID NO: 2133 - protein, 15 aa, Phleum pratense
KLKNVLNVYEARLTK

SEQ ID NO: 2134 - protein, 15 aa, Phleum pratense
EVYEARLTKFKYLAG

SEQ ID NO: 2135 - protein, 15 aa, Phleum pratense
TKFKYLAGDYLSLAD

SEQ ID NO: 2136 - protein, 15 aa, Phleum pratense
AGDYLSLADLNHVST

SEQ ID NO: 2137 - protein, 15 aa, Phleum pratense
VKAWWTDLLAKPSVQ

SEQ ID NO: 2138 - protein, 15 aa, Phleum pratense
KLRFTCLSSTGSSCL

SEQ ID NO: 2139 - protein, 15 aa, Phleum pratense
LSSTGSSCLFVLILF

SEQ ID NO: 2140 - protein, 15 aa, Phleum pratense
EKLKKVLEVYEARLS

SEQ ID NO: 2141 - protein, 15 aa, Phleum pratense
SYLAGDFVSFADLNH

SEQ ID NO: 2142 - protein, 15 aa, Phleum pratense
FVSFADLNHFPKTFY

SEQ ID NO: 2143 - protein, 15 aa, Phleum pratense
FPKTFYFMATPHASL

SEQ ID NO: 2144 - protein, 15 aa, Phleum pratense
HVKAWWERIMARPAV

SEQ ID NO: 2145 - protein, 15 aa, Phleum pratense
IMARPAVKKIAAAMV

SEQ ID NO: 2146 - protein, 15 aa, Phleum pratense
KRKVRGFWRVHQISA

SEQ ID NO: 2147 - protein, 15 aa, Phleum pratense
FWRVHQISARMAPVK

SEQ ID NO: 2148 - protein, 15 aa, Phleum pratense
MAPVKLYGATLSWNV

SEQ ID NO: 2149 - protein, 15 aa, Phleum pratense
GDLYIFESRAICKYA

SEQ ID NO: 2150 - protein, 15 aa, Phleum pratense
EANQYTAALGPILFE

SEQ ID NO: 2151 - protein, 15 aa, Phleum pratense
ACSLFLNYAVSFNYF

SEQ ID NO: 2152 - protein, 15 aa, Phleum pratense
YAVSFNYFVCNLLQE

SEQ ID NO: 2153 - protein, 15 aa, Phleum pratense
NLLQERLKKLKSEHG

SEQ ID NO: 2154 - protein, 15 aa, Phleum pratense
GMTGMLWETSLLDPE

SEQ ID NO: 2155 - protein, 15 aa, Phleum pratense
PEGLLWLLLTGKVPT

SEQ ID NO: 2156 - protein, 15 aa, Phleum pratense
YVYKAIDALPVTAHP

SEQ ID NO: 2157 - protein, 15 aa, Phleum pratense
QFTTGVMALQVESEF

SEQ ID NO: 2158 - protein, 15 aa, Phleum pratense
EDCLNLIARLPQVAS

SEQ ID NO: 2159 - protein, 15 aa, Phleum pratense
IARLPQVASYVYRRI

SEQ ID NO: 2160 - protein, 15 aa, Phleum pratense
ADNSLDYAANFSHML

SEQ ID NO: 2161 - protein, 15 aa, Phleum pratense
DPKMLELMRLYITIH

SEQ ID NO: 2162 - protein, 15 aa, Phleum pratense
ALSDPYLSFAAALNG

SEQ ID NO: 2163 - protein, 15 aa, Phleum pratense
LSFAAALNGLAGPLH

SEQ ID NO: 2164 - protein, 15 aa, Phleum pratense
PLHGLANQEVLLWIK

SEQ ID NO: 2165 - protein, 15 aa, Phleum pratense
QEVLLWIKSVMEETG

SEQ ID NO: 2166 - protein, 15 aa, Phleum pratense
QLKEYVWKTLKSGKV

SEQ ID NO: 2167 - protein, 15 aa, Phleum pratense
EDPLFQLVSKLYEVV

SEQ ID NO: 2168 - protein, 15 aa, Phleum pratense
LVSKLYEVVPGILTE

SEQ ID NO: 2169 - protein, 15 aa, Phleum pratense
SGVLLNHFGLVEARY

SEQ ID NO: 2170 - protein, 15 aa, Phleum pratense
TVLFGVSRSMGIGSQ

SEQ ID NO: 2171 - protein, 15 aa, Phleum pratense
GSQLIWDRALGLPLE

SEQ ID NO: 2172 - protein, 15 aa, Phleum pratense
GPVTILNWSFVRNDQ

SEQ ID NO: 2173 - protein, 15 aa, Phleum pratense
PRFETCYQIALAIKK

SEQ ID NO: 2174 - protein, 15 aa, Phleum pratense
GIQVIQIDEAALREG

SEQ ID NO: 2175 - protein, 15 aa, Phleum pratense
EHAFYLDWAVHSFRI

SEQ ID NO: 2176 - protein, 15 aa, Phleum pratense
FNDIIHSIINMDADV

SEQ ID NO: 2177 - protein, 15 aa, Phleum pratense
SDEKLLSVFREGVTY

SEQ ID NO: 2178 - protein, 15 aa, Phleum pratense
VNKMLAVLDTNILWV

SEQ ID NO: 2179 - protein, 15 aa, Phleum pratense
TRKYAEVMPALTNMV

SEQ ID NO: 2180 - protein, 15 aa, Phleum pratense
PALTNMVTAAKLIRT

SEQ ID NO: 2181 - protein, 15 aa, Phleum pratense
VTAAKLIRTQLASTK

SEQ ID NO: 2182 - protein, 15 aa, Phleum pratense
GRGIKDEGLVVAPGQ

SEQ ID NO: 2183 - protein, 15 aa, Phleum pratense
LTVGNIIAGDRFSMA

SEQ ID NO: 2184 - protein, 15 aa, Phleum pratense
DRFSMAYDRTPEEIL

SEQ ID NO: 2185 - protein, 15 aa, Phleum pratense
YDRTPEEILAIVYGT

SEQ ID NO: 2186 - protein, 15 aa, Phleum pratense
EILAIVYGTGNPAQA

SEQ ID NO: 2187 - protein, 15 aa, Phleum pratense
TREENVYMAKLAEQA

SEQ ID NO: 2188 - protein, 15 aa, Phleum pratense
YEEMVEFMEKVAKTA

SEQ ID NO: 2189 - protein, 15 aa, Phleum pratense
EERNLLSVAYKNVIG

SEQ ID NO: 2190 - protein, 15 aa, Phleum pratense
AYKNVIGARRASWRI

SEQ ID NO: 2191 - protein, 15 aa, Phleum pratense
RRASWRIISSIEQKE

SEQ ID NO: 2192 - protein, 15 aa, Phleum pratense
NEAYVASIKEYRTRI

SEQ ID NO: 2193 - protein, 15 aa, Phleum pratense
SKICDGILKLLDSHL

SEQ ID NO: 2194 - protein, 15 aa, Phleum pratense
ILKLLDSHLVPSATA

SEQ ID NO: 2195 - protein, 15 aa, Phleum pratense
AESKVFYLKMKGDYH

SEQ ID NO: 2196 - protein, 15 aa, Phleum pratense
GDYHRYLAEFKAGAE

SEQ ID NO: 2197 - protein, 15 aa, Phleum pratense
NTLVAYKSAQDIALA

SEQ ID NO: 2198 - protein, 15 aa, Phleum pratense
LPTTHPIRLGLALNF

SEQ ID NO: 2199 - protein, 15 aa, Phleum pratense
IRLGLALNFSVFYYE

SEQ ID NO: 2200 - protein, 15 aa, Phleum pratense
LNFSVFYYEILNSPD

SEQ ID NO: 2201 - protein, 15 aa, Phleum pratense
YKDSTLIMQLLRDNL

SEQ ID NO: 2202 - protein, 15 aa, Phleum pratense
IMQLLRDNLTLWTSD

SEQ ID NO: 2203 - protein, 15 aa, Phleum pratense
GSRALPFLLQLTKQP

SEQ ID NO: 2204 - protein, 15 aa, Phleum pratense
VKVYVVYYSMYGHVG

SEQ ID NO: 2205 - protein, 15 aa, Phleum pratense
GVEVKVWQVPEILSE

SEQ ID NO: 2206 - protein, 15 aa, Phleum pratense
ADGILFGFPTRFGMM

SEQ ID NO: 2207 - protein, 15 aa, Phleum pratense
FHQGKYFAGIAKKLK

SEQ ID NO: 2208 - protein, 15 aa, Phleum pratense
DVYPTVCLPMCVCVL

SEQ ID NO: 2209 - protein, 15 aa, Phleum pratense
EPAYFATAESVRDHL

SEQ ID NO: 2210 - protein, 15 aa, Phleum pratense
QTYYLSMEYLQGRAL

SEQ ID NO: 2211 - protein, 15 aa, Phleum pratense
AVGNLGITGAYAEAV

SEQ ID NO: 2212 - protein, 15 aa, Phleum pratense
AEAVKKFGYELEALA

SEQ ID NO: 2213 - protein, 15 aa, Phleum pratense
RLAACFLDSMATLNL

SEQ ID NO: 2214 - protein, 15 aa, Phleum pratense
LRYRYGLFKQRIAKE

SEQ ID NO: 2215 - protein, 15 aa, Phleum pratense
FSPWEIVRHDVVYPV

SEQ ID NO: 2216 - protein, 15 aa, Phleum pratense
VYPVRFFGHVEILPD

SEQ ID NO: 2217 - protein, 15 aa, Phleum pratense
GEVLNALAYDVPIPG

SEQ ID NO: 2218 - protein, 15 aa, Phleum pratense
IPGYKTKNAISLRLW

SEQ ID NO: 2219 - protein, 15 aa, Phleum pratense
AEDFNLFQFNDGQYE

SEQ ID NO: 2220 - protein, 15 aa, Phleum pratense
EGKLLRLKQQFFLCS

SEQ ID NO: 2221 - protein, 15 aa, Phleum pratense
LKQQFFLCSASLQDI

SEQ ID NO: 2222 - protein, 15 aa, Phleum pratense
PTLAIPELMRLLMDE

SEQ ID NO: 2223 - protein, 15 aa, Phleum pratense
QSVMRKLLPRQMEII

SEQ ID NO: 2224 - protein, 15 aa, Phleum pratense
EEIDKRFREMVISTR

SEQ ID NO: 2225 - protein, 15 aa, Phleum pratense
PQKPVVRMANLCVVS

SEQ ID NO: 2226 - protein, 15 aa, Phleum pratense
ILKEELFADYVSIWP

SEQ ID NO: 2227 - protein, 15 aa, Phleum pratense
PRRWLRFCNPELSEI

SEQ ID NO: 2228 - protein, 15 aa, Phleum pratense
EKLHAEWAAAKLASK

SEQ ID NO: 2229 - protein, 15 aa, Phleum pratense
IKRIHEYKRQLMNIL

SEQ ID NO: 2230 - protein, 15 aa, Phleum pratense
YKRQLMNILGAVYRY

SEQ ID NO: 2231 - protein, 15 aa, Phleum pratense
LGAVYRYKKLKEMSA

SEQ ID NO: 2232 - protein, 15 aa, Phleum pratense
GKAFATYTNAKRIVK

SEQ ID NO: 2233 - protein, 15 aa, Phleum pratense
KRIVKLVNDVGAVVN

SEQ ID NO: 2234 - protein, 15 aa, Phleum pratense
VNKYLKVVFIPNYNV

SEQ ID NO: 2235 - protein, 15 aa, Phleum pratense
VFIPNYNVSVAEVLI

SEQ ID NO: 2236 - protein, 15 aa, Phleum pratense
EDNFFLFGAKADQVA

SEQ ID NO: 2237 - protein, 15 aa, Phleum pratense
TFGTYDYTPLLDSLE

SEQ ID NO: 2238 - protein, 15 aa, Phleum pratense
FLVGYDFPSYIDAQA

SEQ ID NO: 2239 - protein, 15 aa, Phleum pratense
KRWIKMSILNTAGSG

SEQ ID NO: 2240 - protein, 15 aa, Phleum pratense
QYAKEIWGITANPVP

SEQ ID NO: 2241 - protein, 15 aa, Phleum pratense
KTLAVALGGARPLAT

SEQ ID NO: 2242 - protein, 15 aa, Phleum pratense
LATRGVATFTLPDLP

SEQ ID NO: 2243 - protein, 15 aa, Phleum pratense
PDLPYDYGALEPAIS

SEQ ID NO: 2244 - protein, 15 aa, Phleum pratense
HATYVANYNKALEQL

SEQ ID NO: 2245 - protein, 15 aa, Phleum pratense
GDASAVVQLQGAIKF

SEQ ID NO: 2246 - protein, 15 aa, Phleum pratense
DPLVTKGANLIPLLG

SEQ ID NO: 2247 - protein, 15 aa, Phleum pratense
ANLIPLLGIDVWEHA

SEQ ID NO: 2248 - protein, 15 aa, Phleum pratense
HAYYLQYKNVRPDYL

SEQ ID NO: 2249 - protein, 15 aa, Phleum pratense
PDYLTNIWKVVNWKY

SEQ ID NO: 2250 - protein, 15 aa, Phleum pratense
APSGRIVMELYADVV

SEQ ID NO: 2251 - protein, 15 aa, Phleum pratense
VMELYADVVPKTAEN

SEQ ID NO: 2252 - protein, 15 aa, Phleum pratense
HYKGSSFHRVIPGFM

SEQ ID NO: 2253 - protein, 15 aa, Phleum pratense
SIYGAKFADENFIKK

SEQ ID NO: 2254 - protein, 15 aa, Phleum pratense
NGSQFFLCTAKTAWL

SEQ ID NO: 2255 - protein, 15 aa, Phleum pratense
SQVHIRRPGGAGRDG

SEQ ID NO: 2256 - protein, 15 aa, Phleum pratense
RPGGAGRDGGQLRIP

SEQ ID NO: 2257 - protein, 15 aa, Phleum pratense
RDGGQLRIPSLLHGG

SEQ ID NO: 2258 - protein, 15 aa, Phleum pratense
GHGCAQPAMERRKHI

SEQ ID NO: 2259 - protein, 15 aa, Phleum pratense
RKHIEWNCDVCRHGD

SEQ ID NO: 2260 - protein, 15 aa, Phleum pratense
WTTVMRASCGHHRFR

SEQ ID NO: 2261 - protein, 15 aa, Phleum pratense
RFRDCVISSLADFKL

SEQ ID NO: 2262 - protein, 15 aa, Phleum pratense
ISSLADFKLFPVLQH

SEQ ID NO: 2263 - protein, 15 aa, Phleum pratense
PVLQHIISIAVLAIF

SEQ ID NO: 2264 - protein, 15 aa, Phleum pratense
ISIAVLAIFIGLLMI

1-84. (canceled)

85. A method for increasing immunological tolerance in a subject, the method comprising administering at least once an effective amount of a protein or peptide comprising
a) an amino acid sequence selected from the group consisting of SEQ ID NOS: 67, 68, 69, 70, 71, 72, 73, 1-66 and 75-620 or
b) an amino acid sequence having a sequence identity of at least 80% with an amino acid sequence selected from the group of SEQ ID NOs listed in a), or
c) a T cell epitope-containing subsequence of an amino acid sequence selected from the group consisting of SEQ ID NOS: 67, 68, 69, 70, 71, 72, 73, 74, 1-66 and 75-620 or
d) an amino acid sequence having a sequence identity of at least 80% with the subsequence of c).

86. A method for treating a subject of allergy, the method comprising administering at least once an effective amount of a protein or peptide comprising
a) an amino acid sequence selected from the group consisting of SEQ ID NOS: 67, 68, 69, 70, 71, 72, 73, 1-66 and 75-620, or
b) an amino acid sequence having a sequence identity of at least 80% with an amino acid sequence selected from the group of SEQ ID NOs listed in a), or
c) a T cell epitope-containing subsequence of an amino acid sequence selected from the group consisting of SEQ ID NOS: 67, 68, 69, 70, 71, 72, 73, 74, 1-66 and 75-620 or
d) an amino acid sequence having a sequence identity of at least 80% with the subsequence of c).

87. The method according to claim 85, wherein the protein or peptide elicits, stimulates, promotes, induces or enhances a T cell response.

88. The method according to claim 85, wherein the protein or peptide induces IL-5 responses in PBMCs from patients allergic to timothy grass.

89. The method according to claim 85, wherein the protein or peptide is reactive with IgE in patients allergic to timothy grass.

90. The method according to claim 85, wherein the subsequence has a length of 10 to 30 amino acids.

91. The method according to claim 85, wherein the subsequence is selected from the group consisting of SEQ ID NOS: 1521-1549, 1443-1520 and 1550-2264.

92. The method according to claim 85, wherein the subsequence is selected from the group consisting of SEQ ID NOS: 1521, 1523, 1525-1535, 1537-1549, 1454, 1458, 1459, 1460, 1463-1469, 1471-1489, 1492, 1495-1499, 1502, 1504, 1507, 1508, 1513, 1550-1561, 1563, 1576-1579, 1582, 1584-1586, 1589-1602, 1605-1608, 1624, 1628-1634, 1655, 1656, 1668, 1671-1677, 1679-1691, 1696, 1703-1709, 1712-1714, 1716, 1717, 1720, 1739, 1758-1762, 1776, 1782-1786, 1817, 1818, 1823, 1824, 1828, 1832, 1837, 1840, 1847-1857, 1868, 1877-1881, 1883-1886, 1888, 1889, 1891, 1892, 1895-1897, 1899-1903, 1905, 1906, 1908, 1911-1917, 1919-1921, 1923, 1925, 1928, 1931, 1935, 1953, 1954, 1956, 1958-1962, 1971, 1972, 1977-1982, 1985, 1988, 1992, 1994-1996, 2038, 2044, 2062-2064, 2075, 2076, 2078-2080, 2087, 2088, 2091, 2092, 2095, 2100, 2107, 2108, 2113, 2126, 2129-2132, 2134, 2135, 2137-2141, 2149, 2151-2155, 2159-2163, 2166-2172, 2175, 2176, 2178, 2202, 2209, 2210, 2212, 2214, 2217, 2227, 2229-2236, 2239-2244 and 2246-2264.

93. A solid pharmaceutical formulation of a protein or peptide, said protein or peptide comprising
a) an amino acid sequence selected from the group consisting of SEQ ID NOS: 67, 68, 69, 70, 71, 72, 73, 1-66 and 75-620, or
b) an amino acid sequence having a sequence identity of at least 80% with an amino acid sequence selected from the group of SEQ ID NOs listed in a), or
c) a T cell epitope-containing subsequence of an amino acid sequence selected from the group consisting of SEQ ID NOS: 67, 68, 69, 70, 71, 72, 73, 74, 1-66 and 75-620 or
d) an amino acid sequence having a sequence identity of at least 80% with the subsequence of c).

94. The solid pharmaceutical formulation according to claim 93, wherein the protein or peptide elicits, stimulates, promotes, induces or enhances a T cell response.

95. The solid pharmaceutical formulation according to claim 93, which is a powder or a tablet.

96. The solid pharmaceutical formulation according to claim 93, which is in a freeze-dried state.

97. The solid pharmaceutical formulation according to claim 93, which is contained in an ampule or vial.

98. A composition comprising a combination of two or more non-identical peptides selected from the group consisting of a T cell epitope-containing subsequence of any one of SEQ ID NOs: 67, 68, 69, 70, 71, 72, 73, 74, 1-66 and 75-620 or an amino acid sequence having a sequence identity of at least 80% with the subsequence.

99. The composition according to claim 98, wherein said peptides elicit, stimulate, promote, induce or enhance a T cell response.

100. The composition according to claim 98, wherein the subsequence has a length of 10 to 30 amino acids.

101. The composition according to claim 98, wherein the subsequence is selected from the group consisting of SEQ ID NOS: 1521-1549, 1443-1520 and 1550-2264.

102. The composition according to claim 98, wherein the subsequence is selected from the group consisting of SEQ ID NOS: 1521, 1523, 1525-1535, 1537-1549, 1454, 1458, 1459, 1460, 1463-1469, 1471-1489, 1492, 1495-1499, 1502, 1504, 1507, 1508, 1513, 1550-1561, 1563, 1576-1579, 1582, 1584-1586, 1589-1602, 1605-1608, 1624, 1628-1634, 1655, 1656, 1668, 1671-1677, 1679-1691, 1696, 1703-1709, 1712-1714, 1716, 1717, 1720, 1739, 1758-1762, 1776, 1782-1786, 1817, 1818, 1823, 1824, 1828, 1832, 1837, 1840, 1847-1857, 1868, 1877-1881, 1883-1886, 1888, 1889, 1891, 1892, 1895-1897, 1899-1903, 1905, 1906, 1908, 1911-1917, 1919-1921, 1923, 1925, 1928, 1931, 1935, 1953, 1954, 1956, 1958-1962, 1971, 1972, 1977-1982, 1985, 1988, 1992, 1994-1996, 2038, 2044, 2062-2064, 2075, 2076, 2078-2080, 2087, 2088, 2091, 2092, 2095, 2100, 2107, 2108, 2113, 2126, 2129-2132, 2134, 2135, 2137-2141, 2149, 2151-2155, 2159-2163, 2166-2172, 2175, 2176, 2178, 2202, 2209, 2210, 2212, 2214, 2217, 2227, 2229-2236, 2239-2244, 2246-2264.

103. The composition according to claim 98, wherein the peptides are isolated or purified.

104. A protein or peptide comprising
a) an amino acid sequence selected from the group consisting of SEQ ID NOS: 67, 68, 69, 70, 71, 72, 73, 1-66 and 75-620, or
b) an amino acid sequence having a sequence identity of at least 80% with an amino acid sequence selected from the group of SEQ ID NOs listed in a), or
c) a T cell epitope-containing subsequence of an amino acid sequence selected from the group consisting of SEQ ID NOS: 67, 68, 69, 70, 71, 72, 73, 74, 1-66 and 75-620 or
d) an amino acid sequence having a sequence identity of at least 80% with the subsequence of c).

105. The protein or peptide according to claim 104, wherein said protein or peptide elicits, stimulates, promotes, induces or enhances a T cell response.

106. The protein or peptide according to claim 104, wherein the subsequence has a length of 10 to 30 amino acids.

107. The protein or peptide according to claim 104, wherein the subsequence is selected from the group consisting of SEQ ID NOS: 1521-1549, 1443-1520 and 1550-2264.

108. The protein or peptide according to claim 104, wherein the subsequence is selected from the group consisting of SEQ ID NOS: 1521, 1523, 1525-1535, 1537-1549, 1454, 1458, 1459, 1460, 1463-1469, 1471-1489, 1492, 1495-1499, 1502, 1504, 1507, 1508, 1513, 1550-1561, 1563, 1576-1579, 1582, 1584-1586, 1589-1602, 1605-1608, 1624, 1628-1634, 1655, 1656, 1668, 1671-1677, 1679-1691, 1696, 1703-1709, 1712-1714, 1716, 1717, 1720, 1739, 1758-1762, 1776, 1782-1786, 1817, 1818, 1823, 1824, 1828, 1832, 1837, 1840, 1847-1857, 1868, 1877-1881, 1883-1886, 1888, 1889, 1891, 1892, 1895-1897, 1899-1903, 1905, 1906, 1908, 1911-1917, 1919-1921, 1923, 1925, 1928, 1931, 1935, 1953, 1954, 1956, 1958-1962, 1971, 1972, 1977-1982, 1985, 1988, 1992, 1994-1996, 2038, 2044, 2062-2064, 2075, 2076, 2078-2080, 2087, 2088, 2091, 2092, 2095, 2100, 2107, 2108, 2113, 2126, 2129-2132, 2134, 2135, 2137-2141, 2149, 2151-2155, 2159-2163, 2166-2172, 2175, 2176, 2178, 2202, 2209, 2210, 2212, 2214, 2217, 2227, 2229-2236, 2239-2244, 2246-2264.
